(19) United States
(12) Patent Application Publication
(10) Pub. No.: US 2005/0118639 A1
(43) Pub. Date: Jun. 2, 2005

(54) Method of determining ligand

(75) Inventors: Shuji Hinuma, Ibaraki (JP); Ryo Fujii, Ibaraki (JP); Kazuhiro Ogi, Ibaraki (JP); Hidetoshi Komatsu, Ibaraki (JP); Yuji Kawamata, Ibaraki (JP); Masaki Hosoya, Ibaraki (JP)

Correspondence Address: EDWARDS & ANGELL, LLP, P.O. BOX 55874, BOSTON, MA, 02205, US

(73) Assignee: Takeda Chemical Industries, Ltd, Osaka (JP)

(21) Appl. No.: 10/505,486

(22) PCT Filed: Feb. 21, 2003
(86) PCT No.: PCT/JP03/01901

(30) Foreign Application Priority Data
Feb. 22, 2002 (JP) 2002-045728
Jul. 23, 2002 (JP) 2002-213949
Oct. 11, 2002 (JP) 2002-298237

(51) Int. Cl. G01N 33/53; C07K 14/705

(52) U.S. Cl. 435/7.1; 530/350

(57) ABSTRACT

The present invention aims at providing a method of determining a ligand to an orphan receptor. Specifically, the present invention provides a method of determining a ligand to a receptor protein, to which no ligand has been determined, which comprises using a fusion protein of the receptor protein and a fluorescent protein.

### FIELD OF THE INVENTION

[0001] The present invention relates to a method of determining a ligand to a receptor protein present on cell membrane and in particular, relates to a method of determining a ligand to a so-called orphan receptor, of which the ligand is totally unknown.

### BACKGROUND ART

[0002] Physiologically active substances such as various hormones and neurotransmitters regulate the biological function through specific receptor proteins present on cell membranes. Many of these receptor proteins are coupled with guanine nucleotide-binding protein (hereinafter sometimes simply referred to as G protein) and mediate the intracellular signal transduction through activation of G protein. These receptor proteins have the common structure containing seven transmembrane domains and are thus collectively referred to as G protein-coupled receptor proteins or seven-transmembrane receptor proteins (7TMR).

[0003] G protein-coupled receptor proteins are present on the cell surface of each functional cell and organ in an organism, and play important physiological roles as the target of the molecules that regulate the functions of the cells and organs, e.g., hormones, neurotransmitters, physiologically active substances or the like. Receptors transmit signals to cells through binding with physiologically active substances, and the signals induce various reactions such as activation or suppression of the cells.

[0004] To clarify the relationship between substances that regulate the functions of cells and organs in various organisms, and their specific receptor proteins, in particular, G protein-coupled receptor proteins would elucidate the functions of cells and organs in various organisms to provide a very important means for development of pharmaceuticals closely associated with the functions.

[0005] Substances that inhibit binding of G protein-coupled receptor proteins to physiologically active substances (i.e., ligands) or substances that bind and induce signal transduction similar to that induced by physiologically active substances (i.e., ligands) have been hitherto used for pharmaceuticals, as antagonists and agonists specific to these receptors that regulate the biological functions.

[0006] However, even at the present moment, there are a large number of so-called orphan receptors in which the corresponding ligands are yet unidentified. Thus, it has been earnestly desired to identify the ligands and elucidate their functions.

[0007] G protein-coupled receptors are useful in searching for a novel physiological active substance (i.e., ligand) using the signal transduction activity as the index and in search for agonists and antagonists to the receptor. Ligands, agonists, antagonists, or the like to these receptors are expected to be used as prophylactic and/or therapeutic and diagnostic agents for diseases associated with dysfunction of the G protein-coupled receptors.

[0008] GFP (Green Fluorescent Protein) is one of fluorescent proteins derived from the jellyfish Aequorea Victoria of mesozoan animals (WO 96/23810, WO 96/27675, WO 97/26333, WO 97/28261, WO 97/42320).

[0009] A method of determining a ligand to Gi-, Gs- or Gq-coupled orphan receptor using multiple response elements (MRE) and a cAMP response element (CRE) in combination with a reporter activity is reported (Analytical Biochemistry, 275, 54-61, 1999).

[0010] A method of screening molecules which interact on Gs- or Gq-coupled orphan receptors using a cAMP response element (CRE) in combination with a reporter activity is reported (Analytical Biochemistry, 226, 349-354, 1995).

[0011] A method of characterization for Gi- or Gs-coupled receptors with known ligands using a cAMP response element (CRE) in combination with a reporter activity is reported (Current Opinion in Biotechnology, 1995, 6: 574-581).

[0012] A method of detecting the response of a G protein-coupled receptor using a cell in which chimera G protein a subunits with increased promiscuity in coupling specificity for the G protein-coupled receptor, chimera G protein has been expressed is reported (WO 01/36481).

[0013] A method of identifying a ligand for an orphan G protein-coupled receptor using a recombinant yeast expression library is reported (U.S. Pat. No. 6,255,059).

[0014] A method of identifying a receptor activity modifying substance composed of a cell containing both a receptor and a test peptide, which cell is useful for identifying or screening an orphan receptor is reported (US 2001/0026926).

[0015] An expression system for identifying a ligand to an orphan receptor utilizing the gamogenesis system of Saccharomyces is reported (WO 00/031261).

[0016] In conventional methods for searching/identifying a ligand, for example, when a ligand is screened using an eukaryotic cell, a so-called stable cell line capable of stably expressing its receptor should be established, and a special cell was required for establishing the cell line. Moreover, it was necessary for the screening to use a plurality of assays in combination. Thus, when a plurality of test compounds existed, it took a long time, which made it difficult to assay them. That is, conventional methods for searching/identifying ligands, etc. encounter problems that (1) a usable cell line is restricted, (2) it takes time to establish the cell line, (3) because of using a plurality of assays in combination, the number of specimens increases so that it becomes difficult to implement the methods, and so on. A method of determining a ligand that solves these problems and can use various cell lines and implement in a short period of time is desired.

### DISCLOSURE OF THE INVENTION

[0017] The present inventors made extensive investigations. As a result, by preparing a cell wherein a fusion protein of a receptor protein, to which no ligand has been determined, and a fluorescent protein such as GFP was stably or transiently expressed, the inventors have found (1) to (5) below, using immunostaining assay, western blotting assay, etc. utilizing fluorescence from a fluorescent protein such as GFP or a fluorescent protein antibody such as a GFP antibody that:
[0018] (1) expression of the receptor protein could be confirmed on a protein level;
[0019] (2) expression of the receptor protein on a cell membrane could be confirmed;
[0020] (3) an expression level of the receptor protein could be approximated;
[0021] (4) a cell with the receptor protein being highly expressed could be screened; and,
[0022] (5) a specific reaction of the receptor with the ligand could be detected as intracellular internalization of the fusion protein of the receptor and the fluorescent protein; etc. By utilizing these characteristics, the inventors found that a ligand to the receptor protein for which a ligand has not been identified (hereinafter sometimes simply referred to as an orphan receptor) could efficiently be determined. Based on these findings, the present inventors have made further investigations and come to accomplish the present invention.

[0023] That is, the present invention relates to the following features:
[0024] [1] A method of determining a ligand to a receptor protein for which a ligand has not been identified, which comprises using a fusion protein of the receptor protein with a fluorescent protein;
[0025] [2] The ligand determination method according to [1], wherein the fusion protein of a receptor protein for which a ligand has not been identified and GFP is used;
[0026] [3] The ligand determination method according to [1], wherein a cell expressed with the fusion protein of a receptor protein for which a ligand has not been identified and GFP or a membrane fraction of the cell;
[0027] [4] The ligand determination method according to [1], which comprises assaying (1) an activity that accelerates or suppresses arachidonic acid release, acetylcholine release, intracellular Ca²⁺ release, intracellular cAMP production, intracellular cGMP production, inositol phosphate production, changes in cell membrane potential, phosphorylation of intracellular proteins, activation of c-fos or pH reduction, (2) MAP kinase activation, (3) transcription factor activation, (4) diacylglycerol production, (5) opening or closing of ion channels on a cell membrane, (6) apoptosis induction, (7) morphological changes in cells, (8) transport of the fusion protein from cell membrane to cytoplasm, (9) low molecular weight G protein activation, (10) cell divisioh-promoting activity or (11) DNA synthesis-promoting activity;
[0028] [5] The ligand determination method according to [1], wherein transport of the fusion protein from cell membrane to cytoplasm is assayed;
[0029] [6] The ligand determination method according to [5], wherein transport of the fusion protein from cell membrane to cytoplasm is assayed by observing the fluorescence of GFP;
[0030] [7] The ligand determination method according to [1], which comprises bringing a cell capable of expressing the fusion protein of a receptor protein for which a ligand has not been identified the receptor protein and a fluorescent protein and containing a plasmid ligated with a DNA encoding a reporter protein at the downstream of cAMP response element/promoter in contact with a test compound and assaying the activity of the reporter protein;
[0031] [8] The method according to [7], which comprises culturing a cell containing (1) a plasmid containing a DNA encoding the fusion protein of a receptor protein for which a ligand has not been identified and a fluorescent protein and (2) a plasmid ligated with a DNA encoding a reporter protein at the downstream of cAMP response element/promoter, bringing the cell in contact with a test compound and assaying the activity of the reporter protein;
[0032] [9] The ligand determination method according to [2], wherein a cell capable of expressing the fusion protein of a receptor protein for which a ligand has not been identified and GFP and containing a plasmid ligated with a DNA encoding a reporter protein at the downstream of cAMP response element/promoter and assaying the activity of the reporter protein;
[0033] [10] The ligand determination method according to [9], which comprises culturing a cell containing (1) a plasmid containing a DNA encoding the fusion protein of a receptor protein for which a ligand has not been identified and GFP and (2) a plasmid ligated with a DNA encoding a reporter protein at the downstream of cAMP response element/promoter, bringing the cell in contact with a test compound and assaying the activity of the reporter protein;
[0034] [11] The method according to [1], wherein the receptor protein is a G protein-coupled receptor protein;
[0035] [12] The method according to [1], wherein GFP is a protein containing the same or substantially the same amino acid sequence as the amino acid sequence represented by SEQ ID NO: 1, SEQ ID NO: 3, SEQ ID NO: 5 or SEQ ID NO: 7;
[0036] [13] The method according to [7], wherein the promoter is a TATA-like sequence;
[0037] [14] The method according to [7], wherein the reporter protein is luciferase;
[0038] [15] The method according to [7], wherein the plasmid is a plasmid ligated with a TATA-like promoter and a gene encoding the reporter protein at the downstream of cAMP response element;
[0039] [16] The method according to [7], wherein the cell has expressed at least two receptor proteins for which ligand s have not been identified;
[0040] [17] The method according to [7], wherein the cell further contains a plasmid containing a gene encoding an inhibitory G protein α subunit Gi;
[0041] [18] The method according to [7], wherein forskolin is further added;
[0042] [19] The method according to [16], wherein the at least two receptor proteins have similar characteristics;
[0043] [20] The method according to [19], wherein the similar characteristics are the basic expression level of the reporter protein and/or the expression level of the reporter protein when forskolin is added;
[0044] [21] The method according to [16], which comprises measuring the basic expression level of the reporter protein when the at least two receptor proteins are previously expressed individually and/or the expression level of the reporter protein by the addition of forskolin and being expressed in combination the at least two receptor proteins having an equivalent expression level of the reporter protein;
[0045] [22] A fusion protein of a receptor protein for which a ligand has not been identified and a fluorescent protein, or a salt thereof;
[0046] [23] The fluorescent protein or a salt thereof according to [22], wherein the fluorescent protein is GFP;
[0047] [24] A DNA containing a DNA encoding the fusion protein according to [22];
[0048] [25] A recombinant vector containing the DNA according to [22];
[0049] [26] A transformant transformed with the recombinant vector according to [25];
[0050] [27] Use of a fluorescent protein to determine a ligand to a receptor protein for which a ligand has not been identified; and,
[0051] [28] Use of GFP to determine a ligand to a receptor protein for which a ligand has not been identified.

### BRIEF DESCRIPTION OF THE DRAWINGS

[0052] FIG. 1 shows the results (n=2) of detection of reporter activation by cholesterol metabolism-related substances in HEK293 cells transfected with TGR5 expression vector (A) and HEK293 cells transfected with intact vector alone (B).

[0053] FIG. 2 shows the results of induced expression of reporter genes by ligand stimulation in HEK293 cells.

[0054] FIG. 3 shows the results of TGR5 response to lithocholic acid in the co-presence of Gi.

[0055] FIG. 4 shows localization of the TGR5-GFP fusion protein expressed in CHO cells in the absence of ligand. In the figure, white line shows the length of 4 μm.

[0056] FIG. 5 shows localization of the fusion protein 30 minutes after the addition of TLCA to TGR5-GFP-expressed CHO cells. In the figure, white line shows the length of 4 μm.

### BEST MODE FOR CARRYING OUT THE INVENTION

[0057] The ligand determination method of the present invention is characterized by using (1) a fusion protein of a receptor protein for which a ligand has not been identified and a fluorescent protein, more specifically, is a method which comprises bringing a cell wherein the fusion protein of a receptor protein for which a ligand has not been identified and a fluorescent protein has been expressed or a membrane fraction of the cell in contact with a test compound (ligand determination method A).

[0058] Furthermore, the ligand determination method of the present invention includes (1) a method which involves bringing a cell capable of expressing a fusion protein of a receptor protein for which a ligand has not been identified and a fluorescent protein and containing a plasmid ligated with DNA encoding a reporter protein at the downstream of enhancer/promoter in contact with a test compound and assaying the activity of the expression-induced reporter protein, and (2) a method which involves culturing a cell containing (i) a plasmid containing DNA encoding a fusion protein of a receptor protein for which a ligand has not been identified and a fluorescent protein and (ii) a plasmid ligated with DNA encoding a reporter protein at the downstream of enhancer/promoter, and bringing the cell in contact with a test compound and assaying the activity of the expression-induced reporter protein (ligand determination method B).

[0059] As the orphan receptors used in the present invention, for example, G protein-coupled receptor proteins, etc. are employed. Specific examples include G protein-coupled receptor proteins containing the same or substantially the same amino acid sequence as the amino acid sequence represented by SEQ ID NO: 9, G protein-coupled receptor proteins described in WO 96/05302, EP-A-711831, EP-A-789076, EP-A-1103563, EP-A-1103562, Published Japanese Patent Application KOKAI Nos. 8-154682, 8-283295, 8-196278, 8-245697, 8-266280, 9-51795, 9-121865, 9-2388686 and 10-146192, and the like.

[0060] The fluorescent proteins are not particularly limited as far as it is visually recognizable, and include, e.g., GFP (Green Fluorescent Protein), Tag sequence, EGFP (enhanced green fluorescent protein), ECFP (enhanced cyan fluorescent protein), EYFP (enhanced yellow fluorescent protein), DsRED (Discosoma sp. red fluorescent protein), EBFP (enhanced blue fluorescent protein), etc.

[0061] GFP is one of fluorescent proteins derived from the jellyfish Aequorea Victoria of mesozoan animals, and includes proteins containing the same or substantially the same amino acid sequence as the amino acid sequence represented by SEQ ID NO: 1, SEQ ID NO: 3, SEQ ID NO: 5 or SEQ ID NO: 7, etc.

[0062] The amino acid sequence which is substantially the same amino acid sequence as the amino acid sequence represented by SEQ ID NO: 1, SEQ ID NO: 3, SEQ ID NO: 5 or SEQ ID NO: 7 includes an amino acid sequence having at least about 70% homology, preferably at least about 80% homology, more preferably at least about 90% homology and most preferably at least about 95% homology, to the amino acid sequence represented by SEQ ID NO: 1, SEQ ID NO: 3, SEQ ID NO: 5 or SEQ ID NO: 7; or the like.

[0063] Preferred examples of the protein of the present invention which contains substantially the same amino acid sequence as the amino acid sequence represented by SEQ ID NO: 1, SEQ ID NO: 3, SEQ ID NO: 5 or SEQ ID NO: 7 include a protein having substantially the same amino acid sequence as the amino acid sequence represented by SEQ ID NO: 1, SEQ ID NO: 3, SEQ ID NO: 5 or SEQ ID NO: 7 and having the activity substantially equivalent to proteins comprising the amino acid sequence represented by SEQ ID NO: 1, SEQ ID NO: 3, SEQ ID NO: 5 or SEQ ID NO: 7; and the like.

[0064] The activities of GFP include, e.g., fluorescence by excitation light irradiation, etc. The term substantially equivalent activities are used to mean that these activities are equivalent in nature. Thus, though it is preferred that these activities are equivalent (e.g., about 0.01- to about 100-fold, preferably about 0.5- to about 20-fold, more preferably about 0.5- to about 2-fold), quantitative factors such as an activity level, a molecular weight of the protein, etc. may be different.

[0065] The activities in GFP such as fluorescence by excitation light irradiation, etc. can be assayed by publicly known methods with modifications.

[0066] Proteins containing the following amino acid sequences are used as GFP: (1) the amino acid sequences wherein at least 1 or 2 amino acids (preferably approximately 1 to 30 amino acids, more preferably approximately 1 to 10 amino acids, most preferably several (1 to 5) amino acids) are deleted in the amino acid sequence represented by SEQ ID NO: 1, SEQ ID NO: 3, SEQ ID NO: 5 or SEQ ID NO: 7; (2) the amino acid sequences wherein at least 1 or 2 amino acids (preferably approximately 1 to 30 amino acids, more preferably approximately 1 to 10 amino acids, and most preferably several (1 to 5) amino acids) are added to or inserted into the amino acid sequence represented by SEQ ID NO: 1, SEQ ID NO: 3, SEQ ID NO: 5 or SEQ ID NO: 7; (3) the amino acid sequences wherein at least 1 or 2 amino acids (preferably approximately 1 to 30 amino acids, more preferably approximately 1 to 10 amino acids, and most preferably several (1 to 5) amino acids) are substituted by other amino acids in the amino acid sequence represented by SEQ ID NO: 1, SEQ ID NO: 3, SEQ ID NO: 5 or SEQ ID NO: 7; or (4) the amino acid sequence wherein these deletion, addition and substitution are combined; etc. Among others, preferably used are proteins containing (i) the amino acid sequence wherein the N-terminal methionine residue is deleted in the amino acid sequence represented by SEQ ID NO: 1, SEQ ID NO: 3, SEQ ID NO: 5 or SEQ ID NO: 7, (ii) the amino acid sequence wherein the N-terminal methionine residue is deleted and the following alanine residue is substituted with a threonine residue or serine residue in the amino acid sequence represented by SEQ ID NO: 1, SEQ ID NO: 3, SEQ ID NO: 5 or SEQ ID NO: 7; etc.

[0067] Specifically, there are used, for example, (i) GFP consisting of amino acid sequences represented by SEQ ID NO: 1, SEQ ID NO: 3, SEQ ID NO: 5 or SEQ ID NO: 7, (ii) GFP consisting of amino acid sequences represented by SEQ ID NO: 1, SEQ ID NO: 3, SEQ ID NO: 5 or SEQ ID NO: 7, wherein the N-terminal methionine residue is deleted, (iii) GFP consisting of amino acid sequences represented by SEQ ID NO: 1, wherein the N-terminal methionine residue is deleted and the following alanine residue is substituted with a threonine residue or serine residue; etc.

[0068] As the Tag sequence, for example, known sequences below are employed.

(SEQ ID NO: 17)

(1) His-tag (PCDNA3.1/His A)
His His His His His His

(SEQ ID NO: 18)

(2) V5-tag (PCDNA3.1/V5-His A)
Gly Lys Pro Ile Pro Asn Pro Leu Leu Gly Leu Asp
Ser Thr

(SEQ ID NO: 19)

(3) myc-tag (pCDNA3.1/myc-His A)
Glu Gln Lys Leu Ile Ser Glu Glu Asp Leu

(SEQ ID NO: 20)

(4) Xpress-tag (PCDNA3.1/His A)
Asp Leu Tyr Asp Asp Asp Asp Lys

(SEQ ID NO: 21)

(5) HA-tag (PCluzHA Expression vector)
Met Gly Ser Tyr Pro Tyr Asp Val Pro Asp Tyr Ala
Ser Leu Glu Phe

[0069] As EGFP, there is used a protein consisting of the amino acid sequence represented by SEQ ID NO: 7.

[0070] As ECFP, there is used a protein consisting of the amino acid sequence represented by SEQ ID NO: 22.

[0071] As EYFP, there is used a protein consisting of the amino acid sequence represented by SEQ ID NO: 24.

[0072] As DsRtD, there is used a protein consisting of the amino acid sequence represented by SEQ ID NO: 26.

[0073] As EBFP, there is used a protein consisting of the amino acid sequence represented by SEQ ID NO: 28.

[0074] These EGFP, ECFP, EYFP, DsRED and EBFP may be proteins having (1) the amino acid sequence wherein at least 1 or 2 amino acids (preferably approximately 1 to 30 amino acids, more preferably approximately 1 to 10 amino acids, most preferably several (1 to 5) amino acids) are deleted in the amino acid sequences described above; (2) the amino acid sequence wherein at least 1 or 2 amino acids (preferably approximately 1 to 30 amino acids, more preferably approximately 1 to 10 amino acids, and most preferably several (1 to 5) amino acids) are added to or inserted into the amino acid sequences described above; (3) the amino acid sequence wherein at least 1 or 2 amino acids (preferably approximately 1 to 30 amino acids, more preferably approximately 1 to 10 amino acids, and most preferably several (1 to 5) amino acids) are substituted by other amino acids in the amino acid sequences described above; or (4) the amino acid sequence wherein these deletion, addition and substitution are combined; etc., so long as they have the activities such as fluorescence by excitation light irradiation, etc.

[0075] Specifically, the DNA encoding GFP may be any DNA, so long as it is, for example, DNA containing the base sequence represented by SEQ ID NO: 2, SEQ ID NO: 4, SEQ ID NO: 6 or SEQ ID NO: 8, or DNA having a base sequence hybridizable to a complementary base sequence to the base sequence represented by SEQ ID NO: 2, SEQ ID NO: 4, SEQ ID NO: 6 or SEQ ID NO: 8 under high stringent conditions and encoding a protein which has the activities (e.g., fluorescence by excitement light irradiation, etc.) substantially equivalent to those of GFP consisting of the amino acid sequence represented by SEQ ID NO: 1, SEQ ID NO: 3, SEQ ID NO: 5 or SEQ ID NO: 7.

[0076] The DNA hybridizable to the base sequence represented by SEQ ID NO: 2, SEQ ID NO: 4, SEQ ID NO: 6 or SEQ ID NO: 8 includes DNA containing a base sequence having at least about 70% homology, preferably at least about 80% homology, more preferably at least about 90% homology and most preferably at least about 95% homology, to the base sequence represented by SEQ ID NO: 2, SEQ ID NO: 4, SEQ ID NO: 6 or SEQ ID NO: 8; etc.

[0077] The hybridization can be carried out by publicly known methods or by modifications of these methods, for example, according to the method described in Molecular Cloning, 2nd (J. Sambrook et al., Cold Spring Harbor Lab. Press, 1989), etc. A commercially available library may also be used according to the instructions of the attached manufacturer's protocol. More preferably, the hybridization can be carried out under highly stringent conditions.

[0078] The highly stringent conditions used herein are, for example, those in a sodium concentration at about 19 to 40 mM, preferably about 19 to 20 mM at a temperature of about 50 to 70° C., preferably about 60 to 65° C. In particular, hybridization conditions in a sodium concentration of about 19 mM at a temperature of about 65° C. are most preferred.

[0079] More specifically, the DNA encoding GFP consisting of the amino acid sequence represented by SEQ ID NO: 1 includes DNA containing tie base sequence represented by SEQ ID NO: 2 (WO 97/42320), etc.; the DNA encoding GFP consisting of the amino acid sequence represented by SEQ ID NO: 3 includes DNA containing the base sequence represented by SEQ ID NO: 4 (WO 96/23810), etc.; the DNA encoding GFP (GFPuv) consisting of the amino acid sequence represented by SEQ ID NO: 5 includes DNA containing the base sequence represented SEQ ID NO: 6, etc.; the DNA encoding GFP (GFPuv) consisting of the amino acid sequence represented by SEQ ID NO: 5 includes DNA containing the base sequence represented SEQ ID NO: 6, etc. (WO 97/26333), etc.; the DNA encoding GFP (EGFP) consisting of the amino acid sequence represented by SEQ ID NO: 7 includes DNA containing the base sequence represented SEQ ID NO: 8, etc. (NCBI Accession No. AAB0572), etc.

[0080] For the DNA encoding EGFP consisting of the amino acid sequence represented by SEQ ID NO: 7, there may be employed DNA consisting of the base sequence represented by SEQ ID NO: 8, etc.

[0081] For the DNA encoding ECFP consisting of the amino acid sequence represented by SEQ ID NO: 22, there may be employed DNA consisting of the base sequence represented by SEQ ID NO: 23, etc.

[0082] For the DNA encoding EYFP consisting of the amino acid sequence represented by SEQ ID NO: 24, there may be employed DNA consisting of the base sequence represented by SEQ ID NO: 25, etc.

[0083] For the DNA encoding DsRED consisting of the amino acid sequence represented by SEQ ID NO: 26, there may be employed DNA consisting of the base sequence represented by SEQ ID NO: 27, etc.

[0084] For the DNA encoding EBFP consisting of the amino acid sequence represented by SEQ ID NO: 28, there may be employed DNA consisting of the base sequence represented by SEQ ID NO: 29, etc.

[0085] The fusion protein of an orphan receptor and a fluorescent protein can be manufactured using DNA ligated with DNA encoding the orphan receptor protein and DNA encoding GFP.

[0086] The ligated DNA is constructed in frame by ligating the 5′ end of DNA encoding GFP with the 3′ end of the base sequence of DNA encoding the orphan receptor.

[0087] Also, DNA encoding an amino acid sequence composed of approximately 1 to 5 amino acid residues with a small molecular weight such as Ala, Gly, Ser, etc., which is called a linker, may be inserted between the both DNAs.

[0088] The expression vector for the fusion protein of an orphan receptor and a fluorescent protein (hereinafter sometimes simply referred to as the fusion protein) can be manufactured, for example, by (1) preparing a DNA fragment encoding the fusion protein and (2) ligating the DNA fragment at the downstream of a promoter in an appropriate expression vector.

[0089] As the fusion protein of a receptor protein for which a ligand has not been identified and a fluorescent protein, preferably used are, for example, fusion proteins of 102 kinds of receptor proteins for which ligands have not been identified, each receptor protein having the amino acid sequence represented by any one of SEQ ID NO: 30 through SEQ ID NO: 131, and GFP consisting of the amino acid sequence represented by SEQ ID NO: 1. In these amino acid sequences represented by any of SEQ ID NO: 30 through SEQ ID NO: 131, the N-terminal methionine residue is deleted in the amino acid sequence represented by SEQ ID NO: 1 and as the case may be, the following alanine residue is further replaced by a threonine residue or a serine residue.

[0090] The DNA encoding this fusion protein can be prepared by ligating DNA (SEQ ID NO: 2) encoding GFP consisting of the amino acid sequence represented by SEQ ID NO: 1 at the downstream of the region encoding each of the 102 kinds of receptor proteins for which ligands have not been identified. Specifically, a DNA having the base sequence represented by either one of SEQ ID NO: 132 through SEQ ID NO: 233 is used. In these base sequences represented by any of SEQ ID NO: 132 through SEQ ID NO: 233, the 5′ end methionine residue codon is deleted in the base sequence represented by SEQ ID NO: 2 and as the case may be, the following alanine residue codon is further replaced by a threonine residue codon or a serine residue codon.

[0091] Examples of the expression vector include plasmids derived form Escherichia coli (e.g., pCR4, pCR2.1, pBR322, pBR325, pUC12, pUC13), plasmids derived from Bacillus subtilis (e.g., pUB 110, pTP5, pC194), plasmids derived from yeast (e.g., pSH19, pSH15), bacteriophages such as X phage, etc., animal viruses such as retrovirus, vaccinia virus, baculovirus, etc., as well as pA1-11, pXT1, pRc/CMV, pRc/RSV, pcDNAI/Neo, etc.

[0092] The promoter used in the vector may be any promoter if it is suitable to function well with a host used for gene expression. For example, in the case of using animal cells as the host, SRα promoter, SV40 promoter, LTR promoter, CMV promoter, HSV-TK promoter, etc. are used.

[0093] Further in the case of expressing in various tissues, there are employed insulin II promoter (pancreas), Glycoprotein-α subunit promoter (pituitary), transthyretin promoter (liver), renin promoter (kidney), PSE promoter (prostate), CD2 promoter (T cell), IgG-heavy chain promoter (B cell), scavenger-receptor A promoter (macrophage), etc.

[0094] Where the host is bacteria of the genus Escherichia, preferred examples of the promoter include trp promoter, lac promoter, recA promoter, λP_{L} promoter, 1pp promoter, etc. Where the host is bacteria of the genus Bacillus as the host, preferred example of the promoter are SPO1 promoter, SPO2 promoter, penP promoter, etc. When yeast is used as the host, preferred examples of the promoter are PHO5 promoter, PGK promoter, GAP promoter, ADH promoter, etc. When insect cells are used as the host, preferred examples of the promoter include polyhedrin prompter, P10 promoter, etc.

[0095] In addition to the foregoing examples, the expression vector may further optionally contain an enhancer, a splicing signal, a polyA addition signal, a selection marker, SV40 replication origin (hereinafter sometimes abbreviated as SV40ori) etc. Examples of the selection marker include dihydrofolate reductase (hereinafter sometimes abbreviated as dhfr) gene [methotrexate (MTX) resistance], ampicillin resistant gene (hereinafter sometimes abbreviated as Amp^{r}), neomycin resistant gene (hereinafter sometimes abbreviated as Neo^{r}, G418 resistance), etc. In particular, when dhfr gene is used as the selection marker in CHO (dhfr⁻) cells, selection can also be made on thymidine free media.

[0096] If necessary, a signal sequence that matches with a host is added to the N-terminus of the receptor protein of the present invention. Examples of the signal sequence that can be used are Pho A signal sequence, OmpA signal sequence, etc. in the case of using bacteria of the genus Escherichia as the host; α-amylase signal sequence, subtilisin signal sequence, etc. in the case of using bacteria of the genus Bacillus as the host; MFα signal sequence, SUC2 signal sequence, etc. in the case of using yeast as the host; and insulin signal sequence, α-interferon signal sequence, antibody molecule signal sequence, etc. in the case of using animal cells as the host, respectively.

[0097] Using the expression vector containing the DNA encoding the fusion protein of the receptor protein and the fluorescent protein thus constructed, transformants can be manufactured.

[0098] Examples of the host, which may be used, are bacteria belonging to the genus Escherichia, bacteria belonging to the genus Bacillus, yeast, insect cells, insects, animal cells, etc.

[0099] Specific examples of the bacteria belonging to the genus Escherichia include Escherichia coli K12 DH1 (Proc. Natl. Acad. Sci. U.S.A., 60, 160 (1968)), JM103 (Nucleic Acids Research, 9, 309 (1981)), JA221 (Journal of Molecular Biology, 120, 517 (1978)), HB101 (Journal of Molecular Biology, 41, 459 (1969)), C600 (Genetics, 39, 440 (1954)), DH5α (Inoue, H., Nojima, H., Gene, 96, 23-28 (1-990)), DH10B (Proc. Natl. Acad. Sci. USA, 87,4645-4649 (1990)), etc.

[0100] Examples of the bacteria belonging to the genus Bacillus include Bacillus subtilis MI114 (Gene, 24, 255 (1983)), 207-21 (Journal of Biochemistry, 95, 87 (1984)), etc.

[0101] Examples of yeast include Saccharomyces cereviseae AH22, AH22R⁻, NA87-11A, DKD-5D, 20B-12, Schizosaccharomyces pombe NCYC1913, NCYC2036, Pichia pastoris, etc.

[0102] Examples of insect cells include, for the virus AcNPV, Spodoptera frugiperda cells (Sf cells), MG1 cells derived from mid-intestine of Trichoplusia ni, High Five™ cells derived from egg of Trichoplusia ni, cells derived from Mamestra brassicae, cells derived from Estigmena acrea, etc. Where the virus is BmNPV, Bombyx mori N cells (BmN cells), etc. are used. Examples of the Sf cell which can be used are Sf9 cells (ATCC CRL1711), Sf21 cells (both cells are described in Vaughn, J. L. et al., In Vivo, 13, 213-217 (1977), etc.

[0103] As the insect, for example, a larva of Bombyx mori is used (Maeda, et al., Nature, 315, 592 (1985)).

[0104] Examples of animal cells, which are used, are monkey cells COS-7, Vero, Chinese hamster cells CHO (hereinafter referred to as CHO cells), dhfr gene deficient Chinese hamster cells CHO (hereinafter simply referred to as CHO (dhfr⁻) cell), mouse L cells, mouse AtT-20, mouse myeloma cells, rat GH3, human FL cells, pancreas-derived cells (RINm5F, HIT-T15, etc.), pituitary-derived cells (GH3, GH1, RC4/BC, etc.), placenta-derived cells (BeWo, JAR, JEG-3, etc.), liver-derived cells (HepG2, etc.), kidney-derived cells (ACHN, etc.), hematocyte-derived cells (H9, THP-1, U-937, etc.), HeLa cells, etc.

[0105] Bacteria belonging to the genus Escherichia can be transformed, for example, by the method described in Proc. Natl. Acad. Sci. U.S.A., 69, 2110 (1972), Gene, 17, 107 (1982) or the like.

[0106] Bacteria belonging to the genus Bacillus can be transformed, for example, by the method described in Molecular & General Genetics, 168, 111 (1979), etc.

[0107] Yeast can be transformed, for example, by the method described in Methods in Enzymology, 194, 182-187 (1991), Proc. Natl. Acad. Sci. U.S.A., 75, 1929 (1978), etc.

[0108] Insect cells or insects can be transformed, for example, according to the method described in Bio/Technology, 6, 47-55(1988), etc.

[0109] Animal cells can be transformed, for example, according to the method described in Saibo Kogaku (Cell Engineering), extra issue 8, Shin Saibo Kogaku Jikken Protocol (New Cell Engineering Experimental Protocol), 263-267 (1995), published by Shujunsha, or Virology, 52, 456 (1973).

[0110] Thus, the transformant transformed with the expression vector containing the DNA encoding the fusion protein described above can be obtained.

[0111] Where the host is bacteria belonging to the genus Escherichia or the genus Bacillus, the transformant can be appropriately incubated in a liquid medium which contains materials required for growth of the transformant such as carbon sources, nitrogen sources, inorganic materials, and so on. Examples of the carbon sources include glucose, dextrin, soluble starch, sucrose, etc. Examples of the nitrogen sources include inorganic or organic materials such as ammonium salts, nitrate salts, corn steep liquor, peptone, casein, meat extract, soybean cake, potato extract, etc. Examples of the inorganic materials are calcium chloride, sodium dihydrogenphosphate, magnesium chloride, etc. In addition, yeast extract, vitamins, growth promoting factors etc. may also be added to the medium. Preferably, pH of the medium is adjusted to about 5 to about 8.

[0112] A preferred example of the medium for culturing the bacteria belonging to the genus Escherichia is M9 medium supplemented with glucose and Casamino acids [Miller, Journal of Experiments in Molecular Genetics, 431-433, Cold Spring Harbor Laboratory, New York (1972)]. If necessary, a chemical such as 3β-indolylacrylic acid can be added to the medium thereby to activate the promoter efficiently.

[0113] Where the bacteria belonging to the genus Escherichia are used as the host, the transformant is usually cultured at about 15° C. to about 43° C. for about 3 hours to about 24 hours. If necessary, the culture may be aerated or stirred.

[0114] Where the bacteria belonging to the genus Bacillus are used as the host, the transformant is cultured generally at about 30° C. to about 40° C. for about 6 hours to about 24 hours. If necessary, the culture can be aerated or stirred.

[0115] Where yeast is used as the host, the transformant is cultured, for example, in Burkholder's minimal medium [Bostian, K. L. et al., Proc. Natl. Acad. Sci. U.S.A., 77, 4505 (1980)] or in SD medium supplemented with 0.5% Casamino acids [Bitter, G. A. et al., Proc. Nat]. Acad. Sci. U.S.A., 81, 5330 (1984)]. Preferably, pH of the medium is adjusted to about 5 to about 8. In general, the transformant is cultured at about 20° C. to about 35° C. for about 24 hours to about 72 hours. If necessary, the culture can be aerated or stirred.

[0116] Where insect cells or insects are used as the host, the transformant is cultured in, for example, Grace's Insect Medium (Grace, T. C. C., Nature, 195, 788 (1962)) to which an appropriate additive such as immobilized 10% bovine serum is added. Preferably, pH of the medium is adjusted to about 6.2 to about 6.4. Normally, the transformant is cultured at about 27° C. for about 3 days to about 5 days and, if necessary, the culture can be aerated or stirred.

[0117] Where animal cells are employed as the host, the transformant is cultured in, for example, MEM medium containing about 5% to about 20% fetal calf serum [Science, 122, 501 (1952)), DMEM medium (Virology, 8, 396 (1959)], RPMI 1640 medium [The Journal of the American Medical Association, 199, 519 (1967)], 199 medium [Proceeding of the Society for the Biological Medicine, 73, 1 (1950)], etc. Preferably, pH of the medium is adjusted to about 6 to about 8. The transformant is usually cultured at about 30° C. to about 40° C. for about 15 hours to about 60 hours and, if necessary, the culture can be aerated or stirred.

[0118] Suitable media, conditions for culturing, etc. on the respective hosts are publicly known (especially see WO 00/14227, page 24, line 24 to page 26, line 8, EP1111047A2, paragraphs [0090] to [0096]).

[0119] As above, the fusion protein can be expressed in the cell membrane of the transformant.

[0120] The fusion protein can be separated and purified from the culture described above, for example, by the following procedures.

[0121] When the fusion protein is extracted from the culture or cells, after culturing the transformants or cells are collected by a publicly known method and suspended in an appropriate buffer. The transformants or cells are then disrupted by publicly known methods such as ultrasonication, a treatment with lysozyme and/or freeze-thaw cycling, followed by centrifugation, filtration, etc. Thus, the crude extract of the fusion protein can be obtained. The buffer used for the procedures may contain a protein modifier such as urea or guanidine hydrochloride, or a surfactant such as Triton X-100™, etc. When the receptor protein is secreted in the culture, after completion of the cultivation the supernatant can be separated from the transformants or cells to collect the supernatant by a publicly known method.

[0122] The fusion protein contained in the supernatant or the extract thus obtained can be purified by appropriately combining the publicly known methods for separation and purification. Such publicly known methods for separation and purification include a method utilizing difference in solubility such as salting out, solvent precipitation, etc.; a method utilizing mainly difference in molecular weight such as dialysis, ultrafiltration, gel filtration, SDS-polyacrylamide gel electrophoresis, etc.; a method utilizing difference in electric charge such as ion exchange chromatography, etc.; a method utilizing difference in specific affinity such as affinity chromatography, etc.; a method utilizing difference in hydrophobicity such as reverse phase high performance liquid chromatography, etc.; a method utilizing difference in isoelectric point such as isoelectrofocusing electrophoresis; and the like.

[0123] When the fusion protein thus obtained is in a free form, it can be converted into the salt by publicly known methods or modifications thereof. On the other hand, when the fusion protein is obtained in the form of a salt, it can be converted into the free form or in the form of a different salt by publicly known methods or modifications thereof.

[0124] The fusion protein produced by the recombinant can be treated, prior to or after the purification, with an appropriate protein modifying enzyme so that the fusion protein can be appropriately modified to partially remove a polypeptide. Examples of the protein-modifying enzyme include trypsin, chymotrypsin, arginyl endopeptidase, protein kinase, glycosidase or the like.

[0125] The activity of the thus produced fusion protein or salts thereof can be determined by a test binding to a labeled ligand, by an enzyme immunoassay using a specific antibody, or the like.

[0126] Examples of test compounds which are used for the ligand determination method of the present invention include publicly known ligands (for example, angiotensin, bombesin, canavinoid, cholecystokinin, glutamine, serotonin, melatonin, neuropeptide Y, opioids, purines, vasopressin, oxytocin, PACAP (e.g., PACAP27, PACAP38), secretin, glucagon, calcitonin, adrenomedulin, somatostatin, GHRH, CRF, ACTH, GRP, PTH, VIP (vasoactive intestinal and related polypeptide), somatostatin, dopamine, motilin, amylin, bradykinin, CGRP (calcitonin gene-related peptide), leukotriens, pancreastatin, prostaglandins, thromboxane, adenosine, adrenaline, the chemokine superfamily (e.g., the CXC chemokine subfamily such as IL-8, GROα, GROβ, GROγ, NAP-2, ENA-78, GCP-2, PF4, IP-10, Mig, PBSF/SDF-1, etc.; the CC chemokine subfamily such as MCAF/MCP-1, MCP-2, MCP-3, MCP-4, eotaxin, RANTES, MIP-1α, MIP-1β, HCC-1, MIP-3α/LARC, MIP-3β/ELC, I-309, TARC, MIPF-1, MIPF-2/eotaxin-2, MDC, DC-CK1/PARC, SLC, etc.; the C chemokine subfamily such as lymphotactin, etc.; the CX3C chemokine subfamily such as fractalkine, etc.), endothelin, enterogastrin, histamine, neurotensin, TRH, pancreatic polypeptide, galanin, lysophosphatidic acid (LPA), sphingosine 1-phosphate, lysophosphatidylserine, sphingosylphosphorylcholine, lyzophosphatidylcholine, steroids, bile acids, isoprenoids, arachidonic acid metabolites, amines, amino acids, nucleotides, nucleosides, saturated or saturated fatty acids, etc.) as well as other substances, for example, tissue extracts, cell culture supernatants from humans or mammals (e.g., mice, rats, swine, bovine, sheep, monkeys, etc.). For example, the tissue extract, cell culture supernatant, etc. is added to the cell wherein the fusion protein of the orphan receptor and GFP has been expressed, and screening is made while assaying the cell-stimulating activities, etc. to finally determine a single ligand.

[0127] Specifically, the ligand determination method A of the present invention is a method which involves constructing the fusion protein-expressed cell and assaying cell stimulating activities or perform a receptor binding assay by using the expressed cell or its cell membrane fraction, thus determining compounds that bind to the orphan receptors to have the cell stimulating activities (e.g., activities that accelerate or suppress arachidonic acid release, acetylcholine release, intracellular Ca²⁺ release, intracellular cAMP production, intracellular cGMP production, inositol phosphate production, changes in cell membrane potential, phosphorylation of intracellular proteins, activation of c-fos, pH reduction, etc.), MAP kinase activation, activation of transcription factors (e.g., CRE, AP1, NFκB, etc.), diacylglycerol production, opening or closing of ion channels (e.g., K⁺, Ca²⁺, Na⁺, Cl⁻, etc.) on cell membranes, apoptosis induction, morphological changes in cells, transport of the receptor (fusion protein) from cell membrane to cytoplasm, activation of low molecular weight G proteins (e.g., Ras, Rap, Rho, Rab, etc.), cell division-promoting activity, DNA synthesis-promoting activity, etc., that is, ligands (e.g., peptides, proteins, non-peptide compounds, synthetic compounds, fermentation products, etc.).

[0128] The ligand determination methods of the present invention are characterized by assaying, e.g., the binding amount of a test compound to the orphan receptor or the cell stimulating activities, etc., when a cell wherein the fusion protein has been expressed or a membrane fraction of the cell is brought in contact with the test compound.

[0129] More specifically, the present invention provides the following ligand determination methods:
[0130] (1) a method of determining a ligand to the orphan receptor, which comprises assaying the amount of a labeled test compound bound to a cell wherein the fusion protein has been expressed, when the labeled test compound is brought in contact with the cell or the cell membrane fraction;
[0131] (2) a method of determining a ligand to the orphan receptor, which comprises assaying the amount of a labeled test compound bound to a cell wherein the fusion protein has been expressed on a cell membrane by culturing a transformant containing DNA encoding the fusion protein, when the labeled test compound is brought in contact with the fusion protein;
[0132] (3) a method of determining a ligand to the orphan receptor, which comprises assaying the aforesaid cell stimulating activities, MAP kinase activation, activation of transcription factors (e.g., CRE, AP1, NFκB, etc.), diacylglycerol production, opening or closing of ion channels (e.g., K⁺, Ca²⁺, Na⁺, Cl⁻, etc.) on cell membranes, apoptosis induction, morphological changes in cells, transport of the receptor (fusion protein) from cell membrane to cytoplasm, activation of low molecular weight G proteins (e.g., Ras, Rap, Rho, Rab, etc.), cell division-promoting activity, DNA synthesis-promoting activity, etc., which are mediated by the orphan receptor, when a test compound is brought in contact with a cell wherein the fusion protein has been expressed; and,
[0133] (4) a method of determining a ligand to the orphan receptor, which comprises assaying the aforesaid mediated the cell stimulating activities, MAP kinase activation, activation of transcription factors (e.g., CRE, AP1, NFκB, etc.), diacylglycerol production, opening or closing of ion channels (e.g., K⁺, Ca²⁺, Na⁺, Cl⁻, etc.) on cell membranes, apoptosis induction, morphological changes in cells, transport of the receptor (fusion protein) from cell membrane to cytoplasm, activation of low molecular weight G proteins (e.g., Ras, Rap, Rho, Rab, etc.), cell division-promoting activity, DNA synthesis-promoting activity, etc., which are mediated by the orphan receptor, when a test compound is brought in contact with the fusion protein expressed on a cell membrane by culturing a transformant containing DNA encoding the fusion protein.

[0134] In particular, it is preferred to perform the tests (1) and (2) described above, thereby to confirm that the test compound can bind to the orphan receptor, followed by the tests (3) and (4) described above.

[0135] As the case may be, the fusion protein can be isolated and purified from the expression cell described above and the receptor binding assay, etc. may be carried out using the same. For the fusion protein used in the ligand determination method, fusion proteins abundantly expressed using the cells described above are appropriate.

[0136] The fusion protein can be manufactured by the method for expression described above, preferably by expressing DNA encoding the fusion protein in mammalian or insect cells, etc. For introducing a DNA fragment encoding the fusion protein into host animal cells and efficiently expressing the same, it is preferred to insert the DNA fragment downstream a polyhedrin promoter of nuclear polyhedrosis virus (NPV) belonging to a baculovirus, an SV40-derived promoter, a retrovirus promoter, a metallothionein promoter, a human heat shock promoter, a cytomegalovirus promoter, an SRa promoter or the like. The amount and quality of the fusion protein expressed can be determined by a publicly known method. For example, this determination can be made by the method described in the literature [Nambi, P., et al., J. Biol. Chem., 267, 19555-19559 (1992)].

[0137] In the ligand determination methods of the present invention, it is preferred to use the fusion protein-expressed cell or the cell membrane fraction.

[0138] Where the fusion protein-expressed cells are used in the ligand determination methods of the present invention, the cells may be fixed using glutaraldehyde, formalin, etc. The fixation can be made by publicly known methods.

[0139] The cells wherein the fusion protein has been expressed refer to host cells wherein the fusion protein has been expressed, which host cells include Escherichia coli, Bacillus subtilis, yeast, insect cells, animal cells, and the like.

[0140] The cell membrane fraction means a fraction abundant in cell membrane obtained by cell disruption and subsequent fractionation by publicly known methods. Useful cell disruption methods include cell squashing using a Potter-Elvehjem homogenizer, disruption using a Waring blender or Polytron (manufactured by Kinematica Inc.), disruption by ultrasonication, disruption by cell spraying through thin nozzles under an increased pressure using a French press, or the like. Cell membrane fractionation is effected mainly by fractionation using a centrifugal force, such as centrifugation for fractionation and density gradient centrifugation. For example, cell disruption fluid is centrifuged at a low speed (500 rpm to 3,000 rpm) for a short period of time (normally about 1 to about 10 minutes), the resulting supernatant is then centrifuged at a higher speed (15,000 rpm to 30,000 rpm) normally for 30 minutes to 2 hours. The precipitate thus obtained is used as the membrane fraction. The membrane fraction is rich in the fusion protein expressed and membrane components such as cell-derived phospholipids, membrane proteins, etc.

[0141] The amount of the fusion protein in the fusion protein-expressed cells or the cell membrane fraction is preferably 10³ to 10⁸ molecules per cell, more preferably 10⁵ to 10⁷ molecules per cell. As the amount of expression increases, the ligand binding activity per unit of membrane fraction (specific activity) increases so that not only the highly sensitive screening system can be constructed but also large quantities of samples can be assayed with the same lot. The amount of this fusion protein expressed can be roughly estimated from the fluorescence level of GFP in the cells or cell membranes, using a fluorescence microscope or a fluorophotometer.

[0142] To perform the methods (1) and (2) described above for determining a ligand to the orphan receptor, appropriate cells or cell membrane fractions containing the fusion protein and a labeled test compound are required. The fusion protein fraction is desirably a fraction containing a recombinant fusion receptor having an activity equivalent to a naturally occurring fusion protein. Herein, the term “oequivalent activity” means a ligand binding activity, a signal transduction activity, etc., which is equivalent.

[0143] As the labeled test compounds, there are used compounds selected from the aforesaid group of ligand compounds, which are labeled with [³H], [¹²⁵I], [¹⁴C], [³⁵S], etc.

[0144] Specifically, the ligand determination methods of the present invention can be performed by the following procedures. First, a standard fusion protein preparation is prepared by suspending cells wherein the fusion protein has been expressed or the cell membrane fraction in a buffer appropriate for use in the determination method. Any buffer can be used so long as it does not inhibit the ligand-receptor binding, such buffers including a phosphate buffer or a Tris-HCl buffer having pH of 4 to 10 (preferably pH of 6 to 8). For the purpose of minimizing non-specific binding, a surfactant such as CHAPS, Tween-80™ (manufactured by Kao-Atlas Inc.), digitonin or deoxycholate, and various proteins such as bovine serum albumin or gelatin, may optionally be added to the buffer. Further for the purpose of suppressing the degradation of the receptors or ligands by proteases, a protease inhibitor such as PMSF, leupeptin, E-64 (manufactured by Peptide Institute, Inc.) and pepstatin may also be added. A given amount (5,000 to 500,000 cpm) of the test compound labeled with [³H], [¹²⁵I], [¹⁴C], [³⁵S] or the like is added to 0.01 ml to 10 ml of the receptor preparation. To determine the amount of non-specific binding (NSB), a reaction tube containing an unlabeled test compound in a large excess is also prepared. The reaction is carried out at approximately 0 to 50° C., preferably about 4 to 37° C. for about 20 minutes to about 24 hours, preferably about 30 minutes to about 3 hours. After completion of the reaction, the reaction mixture is filtrated through glass fiber filter paper, etc. and washed with an appropriate volume of the same buffer. The residual radioactivity on the glass fiber filter paper is then measured by means of a liquid scintillation counter or γ-counter. A test compound exceeding 0 cpm in count obtained by subtracting nonspecific binding (NSB) from the total binding (B) (B minus NSB) may be selected as a ligand (including an agonist) to the orphan receptor.

[0145] The method (3) or (4) of the present invention described above for determining a ligand can be performed as follows. The aforesaid orphan receptor-mediated cell stimulating activities, for example, MAP kinase activation, activation of transcription factors (e.g., CRE, AP1, NFκB, etc.), diacylglycerol production, opening or closing of ion channels (e.g., K⁺, Ca²⁺, Na⁺, Cl⁻, etc.) on cell membranes, apoptosis induction, morphological changes in cells, transport of the receptor (fusion protein) from cell membrane into cytoplasm, activation of low molecular weight G proteins (e.g., Ras, Rap, Rho, Rab, etc.), cell division-promoting activity, DNA synthesis-promoting activity, etc. can be assayed by publicly known methods or using assay kits commercially available. Specifically, cells wherein the fusion protein has expressed are first cultured on a multi-well plate, etc. Prior to the ligand determination, the medium is replaced with fresh medium or with an appropriate non-cytotoxic buffer, followed by incubation for a given period of time in the presence of a test compound, etc. Subsequently, the cells are extracted or the supernatant is recovered and the resulting product is quantified by appropriate procedures. Where it is difficult to detect the production of the indicator substance (e.g., arachidonic acid, etc.) for the cell-stimulating activity due to a degrading enzyme contained in the cells, an inhibitor against such a degrading enzyme may be added prior to the assay. For detecting activities such as the cAMP production suppression activity, the baseline production in the cells is increased by forskolin or the like and the suppressing effect on the increased baseline production may then be detected.

[0146] In the cell stimulating activities described above, “transport of the receptor to cytoplasm” is assayed by measuring the fluorescence of a fluorescent protein such as GFP, etc., whereby movement of the fusion protein from the cell membrane to the cytoplasm can be observed. In order to observe the movement of the fusion protein from the cell membrane to the cytoplasm, it is suited to use animal cells which have expressed the aforesaid fusion protein stably or transiently. The cells are incubated in an appropriate incubator using an ordinary medium and a test compound diluted to a suitable concentration is added to the cells. In this case, a diluted solution of the test compound may be added directly to the medium, or after the cells are washed with Hanks' balanced salt solution (HBSS, to which BSA may be added in 0 to 10%, preferably 0.1 to 1%), HBSS containing the test compound may be added to the cells. The cells are allowed to stand at 4° C. to 37° C., preferably at 20° C. to 37° C. for 1 minute to 6 hours, preferably for 10 minutes to 2 hours, followed by observing movement of the fusion protein from the cell membrane to the cytoplasm. Though the cells can be observed as they are, the cells may also be fixed with glutaraldehyde, formalin, etc. The cells can be fixed by publicly known methods.

[0147] Observation may be made using an ordinary fluorescence microscope or confocal laser scanning microscope. Also, a plate reader having the function to irradiate excitement light and the function to take fluorescent images in can be used. In this case, after excitement with ultraviolet light, preferably at 395 nm, the fusion protein of the receptor and wild type GFP or GFPuv represented by SEQ ID NO: 3 or SEQ ID NO: 5 can be detected using fluorescein isothianate (FITC) or filters normally commercially available for detecting GFP. In order to detect the fusion protein with GFP represented by SEQ ID NO: 1 or SEQ ID NO: 7, excitement may be effected with excitement light at 460-500 nm, preferably at 488 nm and observation may be made using FITC or filters normally commercially available for detecting GFP.

[0148] In addition to the transport of the receptor (fusion protein) into cytoplasm, morphological changes of the receptor including receptor aggregation, receptor localization, decreased or increased expression of the receptor, etc., which can be microscopically observed, may also be observed.

[0149] In practicing the ligand determination method B of the present invention, it is necessary to incorporate a plasmid containing a DNA encoding the reporter protein at the downstream of a particular enhancer/promoter into cells, preferably eukaryote-derived cells, in addition to the expression vector for the fusion protein. This plasmid may contain a promoter capable of expressing the reporter protein in cells, preferably in eukaryote-derived cells, may further contain a chemical resistant gene (e.g., ampicillin-resistant gene), etc. as a selection marker in the case of proliferating in eukaryotes.

[0150] The plasmid containing a DNA encoding the reporter protein at the downstream of the enhancer/promoter may be any plasmid such as commercially available plasmid, etc., so far as it is capable of expressing the reporter protein in cells under control of the enhancer and is capable of introducing into cells.

[0151] As the enhancer, there is used, for example, a virus-derived enhancer such as papilloma virus, etc., LTR of a retrovirus, cAMP response element (CRE), TPA response element (TRE) or the like, preferably cAMP response element. An enhancer which can be activated by the aforesaid cell stimulating activities mediated by the orphan receptor the cells express is appropriate.

[0152] As the promoter, there is used, for example, SV40 promoter, a TATA-like promoter of HSV thymidine kinase gene, etc., with a TATA-like promoter being preferred.

[0153] As the reporter protein gene, there is used, for example, luciferase gene, β-galactosidase gene, GFP gene, alkaline phosphatase gene, etc. Any enzyme gene is usable as the reporter gene so long as its enzyme activity can be detected by publicly known methods.

[0154] Specific examples of such plasmids include a plasmid ligated with a TATA-like promoter and a reporter protein (e.g., luciferase gene) at the downstream of cAMP response element, e.g., pCRE-Luc (Clontech, Inc.), etc.

[0155] The cells used in the ligand determination method B are the host cells described above, preferably animal cells (e.g., monkey cells COS-7, Vero, CHO cells, CHO (dhfr⁻) cells, mouse L cells, mouse AtT-20, mouse myeloma cells, rat GH3, human FL cells, human HEK293 cells, etc.) and the like.

[0156] The cells may express 2 or more (preferably 2 or 3) fusion proteins.

[0157] Where 2 or more fusion proteins are expressed, it is preferred to use 2 or more orphan receptors having similar biological characteristics.

[0158] Examples of the similar biological characteristics include expression levels of the reporter protein when 2 or more orphan receptors used are expressed independently; etc. Specifically, the characteristics of the respective receptor proteins can be distinguished, using as an indicator (1) the basic expression level of the reporter protein and/or (2) the expression level of the reporter protein in the presence of forskolin, when 2 or more orphan receptors are expressed individually.

[0159] Accordingly, when 2 or more orphan receptors are expressed to determine the ligand, it is desired to previously sort the reporter proteins into those having low, medium and obviously high basic expression levels, etc., or to clarify the receptor protein difficult to increase an expression level of the reporter protein by the addition of forskolin. This is because where two receptor protein, for example, a receptor protein having a high basic expression level of the reporter protein and a receptor having a low basic expression level of the reporter protein are expressed, it becomes difficult to detect an increase in the expression level of the reporter protein when a ligand binds to the latter. That is:
[0160] (1) it is preferred to avoid the mixture of an orphan receptor that the basic expression level of the reporter protein is high and a receptor protein that the basic expression level is low;
[0161] (2) it is preferred not to mix a receptor protein that the expression level of the reporter protein increased by the addition of forskolin is remarkably high with an orphan receptor that the expression level increased is not; and,
[0162] (3) it is preferred that orphan receptors having almost equal basic expression levels of the reporter protein are used and expressed in combination.

[0163] As such, the combination of orphan receptors having similar characteristics includes, for example, the combination of APJ (apelin receptor; Gene, 136, 355 (1993)) and TGR-1 (Japanese Patent Application KOKAI No. 2002-078492).

[0164] The ligand determination method B is specifically described below.

[0165] Cells are plated on a 96-well plate and incubated overnight in DMEM containing, e.g., 10% fetal calf serum. At this stage, an expression plasmid and a reporter plasmid in the fluorescent protein are co-transfected to the cells, using a transfection kit commercially available. The cells are further incubated overnight to express the orphan receptor transiently in the cells. After the cells are washed and the medium is made serum-free, a test compound is added. Where the enhancer is CRE, forskolin may be added simultaneously with the test compound. After incubation is carried out for a given period of time, the cells are lysed and the activities of the reporter protein are assayed.

[0166] In the determination method described above, when the base line for the activities of the reporter protein is high so that a change in the activities is detected by a test compound only with difficulties, it is preferred to take measures for reducing the base line. For example in the case that the orphan receptor is a G protein-coupled receptor protein (GPCR), Gi protein, among a subunits of G protein, showing a cAMP inhibitory effect is added, which makes the detection of a change in activities easy. To express Gi protein, a plasmid capable of expressing a DNA encoding Gi protein can be transfected to cells together with the orphan receptor plasmid and the reporter plasmid. In this case, a mixing ratio of these three plasmids (the orphan receptor plasmid, the reporter plasmid and the Gi plasmid) are preferably in about 5-15:1:1 to 6, more preferably in about 7:1:3.

[0167] In the ligand determination method B of the present invention, where the activities of the reporter protein increase or decrease by about 20% or more, preferably by about 50% or more when a test compound is added, the test compound can be identified to be a ligand.

[0168] The test compound used in the ligand determination method B of the present invention is a compound selected from the test compounds described above.

[0169] Furthermore, the kit of the present invention for determination of the ligand contains cells capable of expressing the fusion protein of the present invention or its cell membrane fraction, etc.

[0170] Examples of the ligand determination kit of the present invention are given below.

1. Reagents for Determining Ligands

(1) Assay Buffer and Wash Buffer

[0171] Hanks' Balanced Salt Solution (manufactured by Gibco Co.) supplemented with 0.05% bovine serum albumin (Sigma Co.).

[0172] The solution is sterilized by filtration through a 0.45 μm filter and stored at 4° C. Alternatively, the solution may be prepared at use.

(2) Fusion Protein Preparation

[0173] CHO cells wherein the fusion protein has been expressed are passaged in a 12-well plate in a density of 5×10⁵ cells/well followed by culturing at 37° C. under 5% CO₂ and 95% air for 2 days.

(3) Labeled Test Compound

[0174] Compounds labeled with [³H], [¹²⁵I], [¹⁴C], [³⁵S], etc., which are commercially available labels, or compounds labeled by appropriate methods.

[0175] An aqueous solution of the compound is stored at 4° C. or −20° C. The solution is diluted to 1 μM with an assay buffer at use. A sparingly water-soluble test compound is dissolved in dimethylformamide, DMSO, methanol, etc.

(4) Non-Labeled Test Compound

[0176] A non-labeled form of the same compound as the labeled compound is prepared in a concentration of 100 to 1,000-fold higher than that of the labeled compound.

2. Assay Method

[0177] (1) CHO cells wherein the fusion protein has been expressed are cultured in a 12-well culture plate. After washing twice with 1 ml of an assay buffer, 490 μl of the assay buffer is added to each well.
[0178] (2) After 5 μl of the labeled test compound is added, the resulting mixture is incubated at room temperature for an hour. To determine the non-specific binding, 5 μl of the non-labeled compound is added to the system.
[0179] (3) The reaction mixture is removed and the wells are washed 3 times with 1 ml of washing buffer. The labeled test compound bound to the cells is dissolved in 0.2N NaOH-1% SDS and then mixed with 4 ml of liquid scintillator A (manufactured by Wako Pure Chemical Industries, Ltd.).
[0180] (4) The radioactivity is measured using a liquid scintillation counter (manufactured by Beckman Co.).

[0181] As such, according to the ligand determination methods (A and B) of the present invention, immunostaining or western blot assay utilizing the fluorescence from the fluorescent protein such as GFP, etc. or a fluorescent protein antibody such as a GFP antibody, etc. is used to effect (1) to (5) below:
[0182] (1) it can be confirmed that the receptor protein has been expressed on a protein level;
[0183] (2) it can be confirmed that the receptor protein has been expressed on a cell membrane;
[0184] (3) an expression level. of the receptor protein can be estimated;
[0185] (4) a cell wherein the receptor protein has been expressed abundantly can be selected; and,
[0186] (5) a specific reaction of the receptor by a ligand can be detected as internalization of the fusion protein of the receptor and the fluorescent protein into cells. By utilizing these features, a ligand to the receptor protein for which a ligand has not been identified (orphan receptor) can be determined efficiently.

[0187] The ligand thus determined binds to its receptor protein to regulate its physiological functions and thus can be used as an agent for the prevention and/or treatment of diseases associated with the functions of the receptor protein. Further using the ligand and its receptor protein, an agonist/antagonist to the receptor can be screened.

[0188] In the specification and drawings, the codes of bases and amino acids are denoted in accordance with the IUPAC-IUB Commission on Biochemical Nomenclature or by the common codes in the art, examples of which are shown below. For amino acids that may have the optical isomer, L form is presented unless otherwise indicated.

[0189] The sequence identification numbers in the sequence listing of the specification indicates the following sequence, respectively.

[SEQ ID NO: 1]

[0190] This shows the amino acid sequence of GFP used in EXAMPLE 1 (hereinafter merely referred to as GFP-1).

SEQ ID NO: 2

[0191] This shows the base sequence of DNA encoding GFP used in EXAMPLE 1.

SEQ ID NO: 3

[0192] This shows the amino acid sequence of wild type GFP.

SEQ ID NO: 4

[0193] This shows the base sequence of DNA encoding wild type GFP.

SEQ ID NO: 5

[0194] This shows the amino acid sequence of GFPuv.

SEQ ID NO: 6

[0195] This shows the base sequence of DNA encoding GFPuv.

SEQ ID NO: 7

[0196] This shows the amino acid sequence of EGFP.

SEQ ID NO: 8

[0197] This shows the base sequence of cDNA encoding EGFP.

SEQ ID NO: 9

[0198] This shows the amino acid sequence of human-derived G protein-coupled receptor protein TGR5 used in EXAMPLE 1.

SEQ ID NO: 10

[0199] This shows the base sequence of cDNA encoding human-derived G protein-coupled receptor protein TGR5 used in EXAMPLE 1.

SEQ ID NO: 11

[0200] This shows the base sequence of primer 1 used for PCR in REFERENCE EXAMPLE 1.

SEQ ID NO: 12

[0201] This shows the base sequence of primer 2 used for PCR in REFERENCE EXAMPLE 1.

SEQ IDNO: 13

[0202] This shows the amino acid sequence of human-derived parathyroid hormone receptor (PTH-R).

SEQ ID NO: 14

[0203] This shows the base sequence of cDNA encoding human-derived parathyroid hormone receptor (PTH-R).

SEQ ID NO: 15

[0204] This shows the amino acid sequence of human-derived GPR40.

SEQ ID NO: 16

[0205] This shows the base sequence of cDNA encoding human-derived GPR40.

SEQ ID NO: 17

[0206] This shows the amino acid sequence of His-Tag.

SEQ ID NO: 18

[0207] This shows the amino acid sequence of V5-tag.

SEQ ID NO: 19

[0208] This shows the amino acid sequence of myc-tag.

SEQ ID NO: 20

[0209] This shows the amino acid sequence of Xpress-tag.

SEQ ID NO: 21

[0210] This shows the amino acid sequence of HA-tag.

SEQ ID NO: 22

[0211] This shows the amino acid sequence of ECFP.

SEQ ID NO: 23

[0212] This shows the base sequence of cDNA encoding ECFP.

SEQ ID NO: 24

[0213] This shows the amino acid sequence of EYFP.

SEQ ID NO: 25

[0214] This shows the base sequence of cDNA encoding EYFP.

SEQ ID NO: 26

[0215] This shows the amino acid sequence of DsRED.

SEQ ID NO: 27

[0216] This shows the base sequence of cDNA encoding DsRED.

SEQ ID NO: 28

[0217] This shows the amino acid sequence of EBFP.

SEQ ID NO: 29

[0218] This shows the base sequence of cDNA encoding EBFP.

SEQ ID NO: 30

[0219] This shows the amino acid sequence of the fusion protein of orphan receptor hBL5 and GFP-1.

SEQ ID NO: 31

[0220] This shows the amino acid sequence of the fusion protein of orphan receptor h7TBA62 and GFP-1.

SEQ ID NO: 32

[0221] This shows the amino acid sequence of the fusion protein of orphan receptor 14273 and GFP-1.

SEQ ID NO: 33

[0222] This shows the amino acid sequence of the fusion protein of orphan receptor EMR3 and GFP-1.

SEQ ID NO: 34

[0223] This shows the amino acid sequence of the fusion protein of orphan receptor GPR15 and GFP-1.

SEQ ID NO: 35

[0224] This shows the amino acid sequence of the fusion protein of orphan receptor GPR31 and GFP-1.

SEQ ID NO: 36

[0225] This shows the amino acid sequence of the fusion protein of orphan receptor GPRC5B and GFP-1.

SEQ ID NO: 37

[0226] This shows the amino acid sequence of the fusion protein of orphan receptor PSEC0142 and GFP-1.

SEQ ID NO: 38

[0227] This shows the amino acid sequence of the fusion protein of orphan receptor HE6 and GFP-1.

SEQ ID NO: 39

[0228] This shows the amino acid sequence of the fusion protein of orphan receptor GPR61 and GFP-1.

SEQ ID NO: 40

[0229] This shows the amino acid sequence of the fusion protein of orphan receptor TGR9 and GFP-1.

SEQ ID NO: 41

[0230] This shows the amino acid sequence of the fusion protein of orphan receptor TGR24 and GFP-1.

SEQ ID NO: 42

[0231] This shows the amino acid sequence of the fusion protein of orphan receptor ZGPR1 and GFP-1.

SEQ ID NO: 43

[0232] This shows the amino acid sequence of the fusion protein of orphan receptor EMR1 and GFP-1.

SEQ ID NO: 44

[0233] This shows the amino acid sequence of the fusion protein of orphan receptor GPR25 and GFP-1.

SEQ ID NO: 45

[0234] This shows the amino acid sequence of the fusion protein of orphan receptor GPR55 and GFP-1.

SEQ ID NO: 46

[0235] This shows the amino acid sequence of the fusion protein of orphan receptor AXOR14 and GFP-1.

SEQ ID NO: 47

[0236] This shows the amino acid sequence of the fusion protein of orphan receptor TM7SF1 and GFP-1.

SEQ ID NO: 48

[0237] This shows the amino acid sequence of the fusion protein of orphan receptor PSP24B and GFP-1.

SEQ ID NO: 49

[0238] This shows the amino acid sequence of the fusion protein of orphan receptor SREB3 and GFP-1.

SEQ ID NO: 50

[0239] This shows the amino acid sequence of the fusion protein of orphan receptor TGR37 and GFP-1.

SEQ ID NO: 51

[0240] This shows the amino acid sequence of the fusion protein of orphan receptor H963 and GFP-1.

SEQ ID NO: 52

[0241] This shows the amino acid sequence of the fusion protein of orphan receptor GPR87 and GFP-1.

SEQ ID NO: 53

[0242] This shows the amino acid sequence of the fusion protein of orphan receptor GPR91 and GFP-1.

SEQ ID NO: 54

[0243] This shows the amino acid sequence of the fusion protein of orphan receptor PNR and GFP-1.

SEQ ID NO: 55

[0244] This shows the amino acid sequence of the fusion protein of orphan receptor TGR29 and GFP-1.

SEQ ID NO: 56

[0245] This shows the amino acid sequence of the fusion protein of orphan receptor TGR36 and GFP-1.

SEQ ID NO: 57

[0246] This shows the amino acid sequence of the fusion protein of orphan receptor H9 and GFP-1.

SEQ ID NO: 58

[0247] This shows the amino acid sequence of the fusion protein of orphan receptor TGR18 and GFP-1.

SEQ ID NO: 59

[0248] This shows the amino acid sequence of the fusion protein of orphan receptor TGR19 and GFP-1.

SEQ ID NO: 60

[0249] This shows the amino acid sequence of the fusion protein of orphan receptor AM-R and GFP-1.

SEQ ID NO: 61

[0250] This shows the amino acid sequence of the fusion protein of orphan receptor GPRI9 and GFP-1:

SEQ ID NO: 62

[0251] This shows the amino acid sequence of the fusion protein of orphan receptor GPR45 and GFP-1.

SEQ ID NO: 63

[0252] This shows the amino acid sequence of the fusion protein of orphan receptor GPRC5D and GFP-1.

SEQ ID NO: 64

[0253] This shows the amino acid sequence of the fusion protein of orphan receptor LGR6 and GFP-1.

SEQ ID NO: 65

[0254] This shows the amino acid sequence of the fusion protein of orphan receptor RUP3 and GFP-1.

SEQ ID NO: 66

[0255] This shows the amino acid sequence of the fusion protein of orphan receptor TGR14 and GFP-1.

SEQ ID NO: 67

[0256] This shows the amino acid sequence of the fusion protein of orphan receptor TPRA40 and GFP-1.

SEQ ID NO: 68

[0257] This shows the amino acid sequence of the fusion protein of orphan receptor GPR22 and GFP-1.

SEQ ID NO: 69

[0258] This shows the amino acid sequence of the fusion protein of orphan receptor GPR52 and GFP-1.

SEQ ID NO: 70

[0259] This shows the amino acid sequence of the fusion protein of orphan receptor FLH2882 and GFP-1.

SEQ ID NO: 71

[0260] This shows the amino acid sequence of the fusion protein of orphan receptor SNORF36 and GFP-1.

SEQ ID NO: 72

[0261] This shows the amino acid sequence of the fusion protein of orphan receptor MRG and GFP-1.

SEQ ID NO: 73

[0262] This shows the amino acid sequence of the fusion protein of orphan receptor SREB2 and GFP-1.

SEQ ID NO: 74

[0263] This shows the amino acid sequence of the fusion protein of orphan receptor GPR12 and GFP-1.

SEQ ID NO: 75

[0264] This shows the amino acid sequence of the fusion protein of orphan receptor GPR30 and GFP-1.

SEQ ID NO: 76

[0265] This shows the amino acid sequence of the fusion protein of orphan receptor GPR82 and GFP-1.

SEQ ID NO: 77

[0266] This shows the amino acid sequence of the fusion protein of orphan receptor RECAP and GFP-1.

SEQ ID NO: 78

[0267] This shows the amino acid sequence of the fusion protein of orphan receptor HB954 and GFP-1.

SEQ ID NO: 79

[0268] This shows the amino acid sequence of the fusion protein of orphan receptor RDC 1 and GFP-1.

SEQ ID NO: 80

[0269] This shows the amino acid sequence of the fusion protein of orphan receptor TGR6 and GFP-1.

SEQ ID NO: 81

[0270] This shows the amino acid sequence of the fusion protein of orphan receptor A-2 and GFP-1.

SEQ ID NO: 82

[0271] This shows the amino acid sequence of the fusion protein of orphan receptor JEG1 8 and GFP-1.

SEQ ID NO: 83

[0272] This shows the amino acid sequence of the fusion protein of orphan receptor GPR17 and GFP-1.

SEQ ID NO: 84

[0273] This shows the amino acid sequence of the fusion protein of orphan receptor GPR35 and GFP-1.

SEQ ID NO: 85

[0274] This shows the amino acid sequence of the fusion protein of orphan receptor GPRC5C and GFP-1.

SEQ ID NO: 86

[0275] This shows the amino acid sequence of the fusion protein of orphan receptor HM74 and GFP-1.

SEQ ID NO: 87

[0276] This shows the amino acid sequence of the fusion protein of orphan receptor RPE and GFP-1.

SEQ ID NO: 88

[0277] This shows the amino acid sequence of the fusion protein of orphan receptor TGR13 and GFP-1.

SEQ ID NO: 89

[0278] This shows the amino acid sequence of the fusion protein of orphan receptor TGR27 and GFP-1.

SEQ ID NO: 90

[0279] This shows the amino acid sequence of the fusion protein of orphan receptor DEZ and GFP-1.

SEQ ID NO: 91

[0280] This shows the amino acid sequence of the fusion protein of orphan receptor ratGPR1 and GFP-1.

SEQ ID NO: 92

[0281] This shows the amino acid sequence of the fusion protein of orphan receptor GPR3 and GFP-1.

SEQ ID NO: 93

[0282] This shows the amino acid sequence of the fusion protein of orphan receptor GPR6 and GFP-1.

SEQ ID NO: 94

[0283] This shows the amino acid sequence of the fusion protein of orphan receptor RAIG1 and GFP-1.

SEQ ID NO: 95

[0284] This shows the amino acid sequence of the fusion protein of orphan receptor TGR2-1 and GFP-1.

SEQ ID NO: 96

[0285] This shows the amino acid sequence of the fusion protein of orphan receptor TGR2-2 and GFP-1.

SEQ ID NO: 97

[0286] This shows the amino acid sequence of the fusion protein of orphan receptor TGR21 and GFP-1.

SEQ ID NO: 98

[0287] This shows the amino acid sequence of the fusion protein of orphan receptor GPR56 and GFP-1.

SEQ ID NO: 99

[0288] This shows the amino acid sequence of the fusion protein of orphan receptor KIAA0758 and GFP-1.

SEQ ID NO: 100

[0289] This shows the amino acid sequence of the fusion protein of orphan receptor RE2 and GFP-1.

SEQ ID NO: 101

[0290] This shows the amino acid sequence of the fusion protein of orphan receptor P40 and GFP-1.

SEQ ID NO: 102

[0291] This shows the amino acid sequence of the fusion protein of orphan receptor GPR27 and GFP-1.

SEQ ID NO: 103

[0292] This shows the amino acid sequence of the fusion protein of orphan receptor HG38 and GFP-1.

SEQ ID NO: 104

[0293] This shows the amino acid sequence of the fusion protein of orphan receptor DRR1 and GFP-1.

SEQ ID NO: 105

[0294] This shows the amino acid sequence of the fusion protein of orphan receptor TGR12 and GFP-1.

SEQ ID NO: 106

[0295] This shows the amino acid sequence of the fusion protein of orphan receptor TGR11 and GFP-1.

SEQ ID NO: 107

[0296] This shows the amino acid sequence of the fusion protein of orphan receptor TGR15 and GFP-1.

SEQ ID NO: 108

[0297] This shows the amino acid sequence of the fusion protein of orphan receptor TGR8 and GFP-1.

SEQ ID NO: 109

[0298] This shows the amino acid sequence of the fusion protein of orphan receptor GPR20 and GFP-1.

SEQ ID NO: 110

[0299] This shows the amino acid sequence of the fusion protein of orphan receptor TGR10 and GFP-1.

SEQ ID NO: 111

[0300] This shows the amino acid sequence of the fusion protein of orphan receptor TGR30 and GFP-1.

SEQ ID NO: 112

[0301] This shows the amino acid sequence of the fusion protein of orphan receptor GPR18 and GFP-1.

SEQ ID NO: 113

[0302] This shows the amino acid sequence of the fusion protein of orphan receptor TGR25 and GFP-1.

SEQ ID NO: 114

[0303] This shows the amino acid sequence of the fusion protein of orphan receptor GPR23 and GFP-1.

SEQ ID NO: 115

[0304] This shows the amino acid sequence of the fusion protein of orphan receptor P2Y10 and GFP-1.

SEQ ID NO: 116

[0305] This shows the amino acid sequence of the fusion protein of orphan receptor GPR37 and GFP-1.

SEQ ID NO: 117

[0306] This shows the amino acid sequence of the fusion protein of orphan receptor ET(B)R-LP-2 and GFP-1.

SEQ ID NO: 118

[0307] This shows the amino acid sequence of the fusion protein of orphan receptor FPRL2 and GFP-1.

SEQ ID NO: 119

[0308] This shows the amino acid sequence of the fusion protein of orphan receptor GPR32 and GFP-1.

SEQ ID NO: 120

[0309] This shows the amino acid sequence of the fusion protein of orphan receptor dj287G14.2 and GFP-1.

SEQ ID NO: 121

[0310] This shows the amino acid sequence of the fusion protein of orphan receptor BRS-3 and GFP-1.

SEQ ID NO: 122

[0311] This shows the amino acid sequence of the fusion protein of orphan receptor GPR39 and GFP-1.

SEQ ID NO: 123

[0312] This shows the amino acid sequence of the fusion protein of orphan receptor 63A2 and GFP-1.

SEQ ID NO: 124

[0313] This shows the amino acid sequence of the fusion protein of orphan receptor GPR84 and GFP-1.

SEQ ID NO: 125

[0314] This shows the amino acid sequence of the fusion protein of orphan receptor GPR21 and GFP-1.

SEQ ID NO: 126

[0315] This shows the amino acid sequence of the fusion protein of orphan receptor GPR48 and GFP-1.

SEQ ID NO: 127

[0316] This shows the amino acid sequence of the fusion protein of orphan receptor SNORF1 and GFP-1.

SEQ ID NO: 128

[0317] This shows the amino acid sequence of the fusion protein of orphan receptor BA12 and GFP-1.

SEQ ID NO: 129

[0318] This shows the amino acid sequence of the fusion protein of orphan receptor MAS and GFP-1.

SEQ ID NO: 130

[0319] This shows the amino acid sequence of the fusion protein of orphan receptor OT7T009 and GFP-1.

SEQ ID NO: 131

[0320] This shows the amino acid sequence of the fusion protein of orphan receptor TGR34 and GFP-1.

SEQ ID NO: 132

[0321] This shows the base sequence of DNA encoding the fusion protein of orphan receptor hBL5 and GFP-1.

SEQ ID NO: 133

[0322] This shows the base sequence of DNA encoding the fusion protein of orphan receptor h7TBA62 and GFP-1.

SEQ ID NO: 134

[0323] This shows the base sequence of DNA encoding the fusion protein of orphan receptor 14273 and GFP-1.

SEQ ID NO: 135

[0324] This shows the base sequence of DNA encoding the fusion protein of orphan receptor EMR3 and GFP-1.

SEQ ID NO: 136

[0325] This shows the base sequence of DNA encoding the fusion protein of orphan receptor GPR15 and GFP-1.

SEQ ID NO: 137

[0326] This shows the base sequence of DNA encoding the fusion protein of orphan receptor GPR31 and GFP-1.

SEQ ID NO: 138

[0327] This shows the base sequence of DNA encoding the fusion protein of orphan receptor GPRC5B and GFP-1.

SEQ ID NO: 139

[0328] This shows the base sequence of DNA encoding the fusion protein of orphan receptor PSEC0142 and GFP-1.

SEQ ID NO: 140

[0329] This shows the base sequence of DNA encoding the fusion protein of orphan receptor HE6 and GFP-1.

SEQ ID NO: 141

[0330] This shows the base sequence of DNA encoding the fusion protein of orphan receptor GPR61 and GFP-1.

SEQ ID NO: 142

[0331] This shows the base sequence of DNA encoding the fusion protein of orphan receptor TGR9 and GFP-1.

SEQ ID NO: 143

[0332] This shows the base sequence of DNA encoding the fusion protein of orphan receptor TGR24 and GFP-1.

SEQ ID NO: 144

[0333] This shows the base sequence of DNA encoding the fusion protein of orphan receptor ZGPR1 and GFP-1.

SEQ ID NO: 145

[0334] This shows the base sequence of DNA encoding the fusion protein of orphan receptor EMR1 and GFP-1.

SEQ ID NO: 146

[0335] This shows the base sequence of DNA encoding the fusion protein of orphan receptor GPR25 and GFP-1.

SEQ ID NO: 147

[0336] This shows the base sequence of DNA encoding the fusion protein of orphan receptor GPR55 and GFP-1.

SEQ ID NO: 148

[0337] This shows the base sequence of DNA encoding the fusion protein of orphan receptor AXOR14 and GFP-1.

SEQ ID NO: 149

[0338] This shows the base sequence of DNA encoding the fusion protein of orphan receptor TM7SF1 and GFP-1.

SEQ ID NO: 150

[0339] This shows the base sequence of DNA encoding the fusion protein of orphan receptor PSP24B and GFP-1.

SEQ ID NO: 151

[0340] This shows the base sequence of DNA encoding the fusion protein of orphan receptor SREB3 and GFP-1.

SEQ ID NO: 152

[0341] This shows the base sequence of DNA encoding the fusion protein of orphan receptor TGR37 and GFP-1.

SEQ ID NO: 153

[0342] This shows the base sequence of DNA encoding the fusion protein of orphan receptor H963 and GFP-1.

SEQ ID NO: 154

[0343] This shows the base sequence of DNA encoding the fusion protein of orphan receptor GPR87 and GFP-1.

SEQ ID NO: 155

[0344] This shows the base sequence of DNA encoding the fusion protein of orphan receptor GPR91 and GFP-1.

SEQ ID NO: 156

[0345] This shows the base sequence of DNA encoding the fusion protein of orphan receptor PNR and GFP-1.

SEQ ID NO: 157

[0346] This shows the base sequence of DNA encoding the fusion protein of orphan receptor TGR29 and GFP-1.

SEQ ID NO: 158

[0347] This shows the base sequence of DNA encoding the fusion protein of orphan receptor TGR3 6 and GFP-1.

SEQ ID NO: 159

[0348] This shows the base sequence of DNA encoding the fusion protein of orphan receptor H9 and GFP-1.

SEQ ID NO: 160

[0349] This shows the base sequence of DNA encoding the fusion protein of orphan receptor TGR18 and GFP-1.

SEQ ID NO: 161

[0350] This shows the base sequence of DNA encoding the fusion protein of orphan receptor TGR19 and GFP-1.

SEQ ID NO: 162

[0351] This shows the base sequence of DNA encoding the fusion protein of orphan receptor AM-R and GFP-1.

SEQ ID NO: 163

[0352] This shows the base sequence of DNA encoding the fusion protein of orphan receptor GPR19 and GFP-1.

SEQ ID NO: 164

[0353] This shows the base sequence of DNA encoding the fusion protein of orphan receptor GPR45 and GFP-1.

SEQ ID NO: 165

[0354] This shows the base sequence of DNA encoding the fusion protein of orphan receptor GPRC5D and GFP-1.

SEQ ID NO: 166

[0355] This shows the base sequence of DNA encoding the fusion protein of orphan receptor LGR6 and GFP-1.

SEQ ID NO: 167

[0356] This shows the base sequence of DNA encoding the fusion protein of orphan receptor RUP3 and GFP-1.

SEQ ID NO: 168

[0357] This shows the base sequence of DNA encoding the fusion protein of orphan receptor TGR14 and GFP-1.

SEQ ID NO: 169

[0358] This shows the base sequence of DNA encoding the fusion protein of orphan receptor TPRA40 and GFP-1.

SEQ ID NO: 170

[0359] This shows the base sequence of DNA encoding the fusion protein of orphan receptor GPR22 and GFP-1.

SEQ ID NO: 171

[0360] This shows the base sequence of DNA encoding the fusion protein of orphan receptor GPR52 and GFP-1.

SEQ ID NO: 172

[0361] This shows the base sequence of DNA encoding the fusion protein of orphan receptor FLH2882 and GFP-1.

SEQ ID NO: 173

[0362] This shows the base sequence of DNA encoding the fusion protein of orphan receptor SNORF36 and GFP-1.

SEQ ID NO: 174

[0363] This shows the base sequence of DNA encoding the fusion protein of orphan receptor MRG and GFP-1.

SEQ ID NO: 175

[0364] This shows the base sequence of DNA encoding the fusion protein of orphan receptor SREB2 and GFP-1.

SEQ ID NO: 176

[0365] This shows the base sequence of DNA encoding the fusion protein of orphan receptor GPR12 and GFP-1.

SEQ ID NO: 177

[0366] This shows the base sequence of DNA encoding the fusion protein of orphan receptor GPR30 and GFP-1.

SEQ ID NO: 178

[0367] This shows the base sequence of DNA encoding the fusion protein of orphan receptor GPR82 and GFP-1.

SEQ ID NO: 179

[0368] This shows the base sequence of DNA encoding the fusion protein of orphan receptor RECAP and GFP-1.

SEQ ID NO: 180

[0369] This shows the base sequence of DNA encoding the fusion protein of orphan receptor HB954 and GFP-1.

SEQ ID NO: 181

[0370] This shows the base sequence of DNA encoding the fusion protein of orphan receptor RDC1 and GFP-1.

SEQ ID NO: 182

[0371] This shows the base sequence of DNA encoding the fusion protein of orphan receptor TGR6 and GFP-1.

SEQ ID NO: 183

[0372] This shows the base sequence of DNA encoding the fusion protein of orphan receptor A-2 and GFP-1.

SEQ ID NO: 184

[0373] This shows the base sequence of DNA encoding the fusion protein of orphan receptor JEG18 and GFP-1.

SEQ ID NO: 185

[0374] This shows the base sequence of DNA encoding the fusion protein of orphan receptor GPR17 and GFP-1.

SEQ ID NO: 186

[0375] This shows the base sequence of DNA encoding the fusion protein of orphan receptor GPR35 and GFP-1.

SEQ ID NO: 187

[0376] This shows the base sequence of DNA encoding the fusion protein of orphan receptor GPRC5C and GFP-1.

SEQ ID NO: 188

[0377] This shows the base sequence of DNA encoding the fusion protein of orphan receptor HM74 and GFP-1.

SEQ ID NO: 189

[0378] This shows the base sequence of DNA encoding the fusion protein of orphan receptor RPE and GFP-1.

SEQ ID NO: 190

[0379] This shows the base sequence of DNA encoding the fusion protein of orphan receptor TGR 13 and GFP-1.

SEQ ID NO: 191

[0380] This shows the base sequence of DNA encoding the fusion protein of orphan receptor TGR27 and GFP-1.

SEQ ID NO: 192

[0381] This shows the base sequence of DNA encoding the fusion protein of orphan receptor DEZ and GFP-1.

SEQ ID NO: 193

[0382] This shows the base sequence of DNA encoding the fusion protein of orphan receptor ratGPR1 and GFP-1.

SEQ ID NO: 194

[0383] This shows the base sequence of DNA encoding the fusion protein of orphan receptor GPR3 and GFP-1.

SEQ ID NO: 195

[0384] This shows the base sequence of DNA encoding the fusion protein of orphan receptor GPR6 and GFP-1.

SEQ ID NO: 196

[0385] This shows the base sequence of DNA encoding the fusion protein of orphan receptor RAIG1 and GFP-1.

SEQ ID NO: 197

[0386] This shows the base sequence of DNA encoding the fusion protein of orphan receptor TGR2-1 and GFP-1.

SEQ ID NO: 198

[0387] This shows the base sequence of DNA encoding the fusion protein of orphan receptor TGR2-2 and GFP-1.

SEQ ID NO: 199

[0388] This shows the base sequence of DNA encoding the fusion protein of orphan receptor TGR21 and GFP-1.

SEQ ID NO: 200

[0389] This shows the base sequence of DNA encoding the fusion protein of orphan receptor GPR56 and GFP-1.

SEQ ID NO: 201

[0390] This shows the base sequence of DNA encoding the fusion protein of orphan receptor KIAA0758 and GFP-1.

SEQ ID NO: 202

[0391] This shows the base sequence of DNA encoding the fusion protein of orphan receptor RE2 and GFP-1.

SEQ ID NO: 203

[0392] This shows the base sequence of DNA encoding the fusion protein of orphan receptor P40 and GFP-1.

SEQ ID NO: 204

[0393] This shows the base sequence of DNA encoding the fusion protein of orphan receptor GPR27 and GFP-1.

SEQ ID NO: 205

[0394] This shows the base sequence of DNA encoding the fusion protein of orphan receptor HG38 and GFP-1.

SEQ ID NO: 206

[0395] This shows the base sequence of DNA encoding the fusion protein of orphan receptor DRR1 and GFP-1.

SEQ ID NO: 207

[0396] This shows the base sequence of DNA encoding the fusion protein of orphan receptor TGR12 and GFP-1.

SEQ ID NO: 208

[0397] This shows the base sequence of DNA encoding the fusion protein of orphan receptor TGR11 and GFP-1.

SEQ ID NO: 209

[0398] This shows the base sequence of DNA encoding the fusion protein of orphan receptor TGR15 and GFP-1.

SEQ ID NO: 210

[0399] This shows the base sequence of DNA encoding the fusion protein of orphan receptor TGR8 and GFP-1.

SEQ ID NO: 211

[0400] This shows the base sequence of DNA encoding the fusion protein of orphan receptor GPR20 and GFP-1.

SEQ ID NO: 212

[0401] This shows the base sequence of DNA encoding the fusion protein of orphan receptor TGR10 and GFP-1.

SEQ ID NO: 213

[0402] This shows the base sequence of DNA encoding the fusion protein of orphan receptor TGR30 and GFP-1.

SEQ ID NO: 214

[0403] This shows the base sequence of DNA encoding the fusion protein of orphan receptor GPR1 8 and GFP-1.

SEQ ID NO: 215

[0404] This shows the base sequence of DNA encoding the fusion protein of orphan receptor TGR25 and GFP-1.

SEQ ID NO: 216

[0405] This shows the base sequence of DNA encoding the fusion protein of orphan receptor GPR23 and GFP-1.

SEQ ID NO: 217

[0406] This shows the base sequence of DNA encoding the fusion protein of orphan receptor P2Y10 and GFP-1.

SEQ ID NO: 218

[0407] This shows the base sequence of DNA encoding the fusion protein of orphan receptor GPR37 and GFP-1.

SEQ ID NO: 219

[0408] This shows the base sequence of DNA encoding the fusion protein of orphan receptor ET(B)R-LP-2 and GFP-1.

SEQ ID NO: 220

[0409] This shows the base sequence of DNA encoding the fusion protein of orphan receptor FPRL2 and GFP-1.

SEQ ID NO: 221

[0410] This shows the base sequence of DNA encoding the fusion protein of orphan receptor GPR32 and GFP-1.

SEQ ID NO: 222

[0411] This shows the base sequence of DNA encoding the fusion protein of orphan receptor dj287G14.2 and GFP-1.

SEQ ID NO: 223

[0412] This shows the base sequence of DNA encoding the fusion protein of orphan receptor BRS-3 and GFP-1.

SEQ ID NO: 224

[0413] This shows the base sequence of DNA encoding the fusion protein of orphan receptor GPR39 and GFP-1.

SEQ ID NO: 225

[0414] This shows the base sequence of DNA encoding the fusion protein of orphan receptor 63A2 and GFP-1.

SEQ ID NO: 226

[0415] This shows the base sequence of DNA encoding the fusion protein of orphan receptor GPR84 and GFP-1.

SEQ ID NO: 227

[0416] This shows the base sequence of DNA encoding the fusion protein of orphan receptor GPR21 and GFP-1.

SEQ ID NO: 228

[0417] This shows the base sequence of DNA encoding the fusion protein of orphan receptor GPR48 and GFP-1.

SEQ ID NO: 229

[0418] This shows the base sequence of DNA encoding the fusion protein of orphan receptor SNORF1 and GFP-1.

SEQ ID NO: 230

[0419] This shows the base sequence of DNA encoding the fusion protein of orphan receptor BA12 and GFP-1.

SEQ ID NO: 231

[0420] This shows the base sequence of DNA encoding the fusion protein of orphan receptor MAS and GFP-1.

SEQ ID NO: 232

[0421] This shows the base sequence of DNA encoding the fusion protein of orphan receptor OT7T009 and GFP-1.

SEQ ID NO: 233

[0422] This shows the base sequence of DNA encoding the fusion protein of orphan receptor TGR34 and GFP-1.

[0423] The transformant Escherichia coli JM109/pCR4-hTGR5 obtained in REFERENCE EXAMPLE 1 has been on deposit with International Patent Organisms Depository, National Institute of Advanced Industrial Science and Technology (formerly, National Institute of Bioscience and Human-Technology (NIBH), Ministry of Economics, Trade and Industry) located at Central 6, 1-1-1 Higashi, Tsukuba, Ibaraki (post code: 305-8566), as the Accession Number FERM BP-7114 since Apr. 3, 2000, and with Institute for Fermentation (IFO), located at 2-17-85 Juso-honmachi, Yodogawa-ku, Osaka-shi, Osaka (post code: 532-8686), as the Accession Number IFO 16410 since March 23, 2000.

### EXAMPLES

[0424] The present invention is described in detail below with reference to EXAMPLES and REFERENCE EXAMPLES, but is not deemed to limit the scope of the present invention thereto. The gene manipulation procedures using Escherichia coli were performed according to the methods described in the Molecular Cloning.

### Reference Example 1

Cloning of cDNA Encoding G Protein-Coupled Receptor Protein of Human Spleen and Determination of the Base Sequence

[0425] Using human spleen-derived cDNA (Clontech) as a template and two primers, namely, primer 1 (SEQ ID NO: 11) and primer 2 (SEQ ID NO: 12), PCR was carried out. The reaction solution in the above reaction comprised of 1/10 volume of the cDNA described above as a template, 1/50 volume of Advantage-GC2 Polymerase Mix (Clontech), 0.5 μM each of primer 1 (SEQ ID NO: 11) and primer 2 (SEQ ID NO: 12), 200 μM of dNTPs, 1/5 volume of a buffer attached to the enzyme product and 1/5 volume of GC Melt to make the total volume 20 11. The PCR reaction was carried out by reacting at 94° C. for 5 minutes, then repeating 30 times a cycle set to include 94° C. for 30 seconds, 60° C. for 30 seconds and 68° C. for 2 minutes, and finally conducting extension at 68° C. for 5 minutes. The PCR product was subcloned to plasmid vector pCR4 (Invitrogen) following the instructions attached to the TA Cloning Kit (Invitrogen). The plasmid was then transfected to Escherichia coli JM109, and the clones containing the cDNA of the PCR product were selected on LB agar plates containing ampicillin. As a result of analysis for the sequence of each clone, cDNA sequence encoding a novel G protein-coupled receptor protein was obtained (SEQ ID NO: 10). The novel G protein-coupled receptor protein containing the amino acid sequence (SEQ ID NO: 9) deduced from this cDNA sequence was named TGR5. Also, the transformant containing DNA represented by SEQ ID NO: 10 was named Escherichia coli JM109/pCR4-hTGR5.

### Reference Example 2

Detection of Reporter Activation with Cholesterol Metabolism-Related Substance in Human HEK293 Cells wherein TGR5 was Expressed Transiently

[0426] The TGR5-specific stimulation activity by cholesterol metabolism-related substance was detected using as an indicator the expression level of a reporter gene product (luciferase) produced by expression induction of CRE promoter.

[0427] Human-derived HEK293 cells were suspended in growth redium (DMEM (Dulbecco's Modified Eagle Medium) (Gibco BRL) supplemented with 10% fetal cow serum (Gibco BRL)). The suspension adjusted to a concentration of 1×10⁵ cells/well was plated on a collagen-coated black well 96-well plate (Becton Dickinson, Inc.).

[0428] After culturing overnight at 37° C. under the 5% CO₂ condition, the TGR5 gene was inserted into an expression vector for animal cell pAKKO-111H (the same plasmid vector as pAKKO-1.111H described in Biochem. Biophys. Acta, Hinuma, S. et al., 1219, 251-259, 1994) by publicly known methods, together with a reporter gene-containing plasmid pCRE-Luc (Clontech). The thus prepared TGR5 expression vector plasmid or intact pAKKO-111H containing no TGR5 gene was transfected to the cells as described below.

[0429] By mixing OPTI-MEM-I (Gibco BRL, Inc.) and Lipofectamine™ 2000 reagent (Gibco BRL, Inc.) in 24:1, a Lipofectamine dilution was prepared. Also, OPTI-MEM-I, TGR5 expression vector plasmid or the intact vector plasmid (240 ng/μl) and pCRE-Luc (240 ng/μl) were mixed in 24:0.9:0.1 to prepare a DNA dilution. The Lipofectamine dilution and the DNA dilution were mixed in equal volumes and the mixture was allowed to stand for 20 minutes at room temperature to produce the DNA-Lipofectamine complex. Then, 25 μl of the solution was added to the HEK293 cell-incubated plate described above, followed by further culturing overnight at 37° C. under the 5% CO₂ condition.

[0430] The transfected HEK293 cells were washed with an assay medium (DMEM supplemented with 0.1% bovine serum albumin) and lithocholic acid (Wako Pure Chemical Industries, Inc.) and progesterone (Wako Pure Chemical Industries, Inc.) diluted with the assay medium to 2×10⁻⁵ M were added to the plate, which was then incubated for 4 hours at 37° C. under the 5% CO₂ condition. The culture supernatant was discarded and 50 μl of a substrate for assaying the luciferase activity or PicaGene LT 2.0 (Toyo Ink Mfg. Co., Ltd.) was added. The fluorescence level of luciferase was measured by using a plate reader (ARVO sx multi-label counter, Wallac, Inc.).

[0431] As a result, an increased luciferase activity by lithocholic acid and progesterone was noted specifically to the HEK293 cells transfected with TGR5 gene having the base sequence represented by SEQ ID NO: 10 (FIG. 1).

### Reference Example 3

Transfection of G Protein-Coupled Receptor Protein-Expressed Plasmid and Reporter Plasmid to Host Cells

[0432] Using expression plasmids for animal cells inserted with various G protein-coupled receptor protein cDNAs prepared by publicly known methods, i.e., thyrotropin releasing hormnone receptor (TRHR), neuromedin U receptor (FM-3 and TGR-1), prolactin releasing factor receptor (hGR3), apelin receptor (APJ), etc., Escherichia coli JM109 was transfected and the colonies obtained were isolated and cultured. Thereafter, plasmid was prepared using QIAGEN Plasmid Maxi Kit (Qiagen). Furthermore, the reporter plasmid of pCRE-Luc (Clontech) ligated with a luciferase gene as a reporter at the downstream of cAMP response element (CRE) was prepared in a similar manner.

[0433] Human HEK293 cells as host cells for transfecting the G protein-coupled receptor protein and the reporter plasmid thereto were plated on a type I collagen-coated 96-well black plate (Becton Dickinson, Inc.) in 100,000 cells/well in a culture solution volume of 100 μl, followed by culturing overnight. In the same way, CHO (dhfr-) cells were transformed by pAKKO-111H and the resulting CHO-mock cells were plated on a 96-well black plate of Costar, Inc. in 40,000 cells/well in a culture solution volume of 100 μl, followed by culturing overnight. In the both cells, DMEM (Gibco BRL, Inc.) supplemented with 10% fetal calf serum alone was used as a medium for plate culture.

[0434] Each of the plasmids above was diluted to a concentration of 240 ng/μl, and the dilution was added to 240 μl of Opti-MEM-I (Gibco BRL, Inc.) in a proportion of 9 μl of the G protein-coupled receptor protein expression plasmid and 1 μl of the reporter plasmid. The mixture was mixed with 240 μl of Opti-MEM-I added with 10 μl of Lipofectamine 2000 (Gibco BRL, Inc.) in equal volumes to form the liposome and plasmid complex, in accordance with the procedures in the instruction manuals attached to Lipofectamine 2000. Also, for carrying out efficient screening, 5 μl each of the 3 receptor expression plasmids was added in a concentration of 240 ng/μl and the mixtures having the same proportion of the other reagents as described above were prepared. The mixtures were added to the culture solution of HEK293 or CHO-mock cells in 25 μl each/well and incubated at 37° C. overnight to introduce the plasmids. In the CHO-mock cells, the culture solution was replaced by an assay buffer (DMEM supplemented with 0.1% bovine serum albumin) 4 hours after the plasmid addition to make serum-free.

### Reference Example 4

Detection of Ligand Activity by Reporter Assay

[0435] In the HEK293 cells, the culture solution was replaced by the assay buffer of REFERENCE EXAMPLE 3 an hour before the assaying and pre-incubated. A solution of a ligand or a ligand candidate compound in the assay buffer was prepared and added to the HEK293 cells or CHO-mock cells prepared in REFERENCE EXAMPLE 3. Also, an assay was conducted in a similar manner under the conditions where forskolin was added to the assay buffer in the final concentration of 2 μM. After the ligand or the test compound was added, incubation was carried out for 4 hours to induce promotion or suppression of the transcription/translation of the reporter gene derived from intracellular signal transduction caused by the agonist activity of ligand mediated by the receptor. After the incubation was completed, the assay buffer in each well was removed and 50 μl each of luminescent substrate PicaGene LT 2.0 (Toyo Ink Mfg. Co., Ltd.) was added to the well. After the cells were lysed and thoroughly mixed with the substrate, the luminescent level corresponding to the expression induction level of the reporter gene in each well was measured on the plate reader described in REFERENCE EXAMPLE 2.

[0436] Using expression plasmids in which various G protein-coupled receptor protein cDNAs were inserted in accordance with the procedures described in REFERENCE EXAMPLES 3 and 4, the expression induction of the reporter gene by ligand stimulation was assayed in HEK293 cells. In CRFR coupled to GS as a subunit of G protein for transduction of signals into cells, activation of the reporter gene due to the ligand addition was detected under both conditions in the absence of and in the presence of forskolin. In APJ coupled to inhibitory Gi, suppressed expression of the reporter gene due to the ligand addition was detected under the condition that forskolin was added. Further in the receptors TRHR, FM-3 and TGR-1 coupled to Gq, promoted expression of the reporter gene was detected under the condition that forskolin was added. Also in the receptor hGR3 coupled to both Gq and Gi, promoted expression of the reporter gene was detected as well, under the condition that forskolin was added (FIG. 2).

### Reference Example 5

Reporter Assay using Inhibitory G Protein a Subunit Gi-Expressed Plasmid

[0437] Inhibitory G protein α subunit (Gi)-expressed plasmid was prepared in a similar manner to the G protein receptor-expressed plasmid shown in REFERENCE EXAMPLE 3 (herein Gi may be any kind irrespective of any animal species). This plasmid, the receptor-expressed plasmid and the reporter plasmid were added to 240 μl of Opti-MEM-I in the proportion of 3 μl, 7 μl and 1 μl and DNA was introduced into HEK293 or CHO-mock cells otherwise under the same conditions as in EXAMPLE 2. The mixing ratio of these 3 plasmids is from 1 to 6 μl of Gi, preferably from 1 to 3 μl, when the total amount is made 11 μl. These plasmids were assayed in accordance with the procedures of EXAMPLE 3 and the ligand activities were detected.

[0438] That is, the response of TGR5 to lithocholic acid in the co-presence of Gi was detected. As a result, Gi was co-expressed together with TGR5 in the assay for G protein receptor TGR5 using the CHO-mock cells, whereby the luciferase activity added with no ligand (ligand (−)) could be markedly reduced, which enabled to detect the increase in activity by the ligand (lithocholic acid, 2×10⁻⁵ M, ligand (+)) (FIG. 3).

### Example 1

Internalization of the TGR5-GFP Fusion Protein Expressed on CHO Cells by the Addition of Taurolithocholic Acid

[0439] An expression plasmid was constructed to express the fusion protein in which TGR5 was fused at the C terminus with Green Fluorescent Protein (GFP) isolated from jelly fish Aequorea victoria. In this case, a fragment excised from expression vector pQBI25 (TaKaRa Shuzo) for GFP was used as cDNA (SEQ ID NO: 2) of GFP. In the cDNA of TGR5, its termination codon was corrected by PCR to the recognition sequence of restriction enzyme NheI, and the cDNA fragment of GFP was ligated thereto, which was inserted into expression vector pAKKO-111H described in EXAMPLE 1. The expression vector plasmid for the thus obtained fusion protein of TGR5 and GFP (hereinafter TGR5-GFP) was transfected to CHO-mock cells by the following procedures. The CHO-mock cells were suspended in growth medium [DMEM (Dulbecco's Modified Eagle Medium) (GIBCO BRL, Inc.) supplemented with 10% fetal calf serum (GIBCO BRL, Inc.)] and plated on a Lab-TekII coverglass chamber (Nalgen Nunc, Inc.) with 4 chamber compartments in a concentration of 0.6×10⁵ cells/chamber. After culturing overnight at 37° C. under the 5% CO₂ condition, transfection was effected. For the transfection, Lipofectamine™ 2000 reagent (GIBCO BRL, Inc.) was used. First, 2 μl of Lipofectamine™ 2000 reagent was mixed with 50 μl of OPTI-MEM-I (GIBCO BRL, Inc.). After allowing to stand for 5 minutes, the mixture wasgmixed with a solution mixture of 0.48 μg of DNA and 50 μl of OPTI-MEM-1. The mixture was left to stand at room temperature for 20 minutes, thereby to form the DNA-lipofectamine complex. After 100 μl of the mixture was added to the chamber above where the CHO cells were incubated, incubation was conducted overnight at 37° C. under the 5% CO₂ condition. The medium was replaced by medium for confocal laser scanning microscopic observation [suspension of 0.1% bovine albumin (Essentially Fatty Acid Free (GIBCO BRL, Inc.) in Hanks' Balanced Salt Solution (GIBCO BRL, Inc.))] and the fluorescent image of GFP was observed on a confocal laser scanning microscope (Leica). In this case, GFP was excited at 488 nm.

[0440] As a result, the TGR5-GFP fluorescent protein was observed in the cell membrane (FIG. 4). Taurolithocholic acid was added to the cells to have 10⁻⁵ M in the medium. It was found that 30 minutes after, the fluorescence of GFP was moved to the cytoplasm, not in the cell membrane (FIG. 5). This indicates that TGR5 is a G protein-coupled receptor and at the same time, TGR5 moves to the cytoplasm, namely, internalized, in response to taurolithocholic acid.

### Example 2

Expression of the Fusion Protein of Parathyroid Hormone Receptor (PTH-R) and GFP in Pancreas β Cell Line RINm5F by Transient Expression

[0441] Expression vector was prepared in a manner similar to EXAMPLE 1 by inserting an expression plasmid for expressing the fusion protein of human PTH-R (SEQ ID NO: 13) and GFP at the C terminus into expression vector pAKKO-111H described in REFERENCE EXAMPLE 2. The expression vector plasmid for the thus obtained fusion protein of PTH-R and GFP (hereinafter PTH-GFP) was transfected to RINm5F cells by the following procedures. The RINm5F cells were suspended in growth medium [RPMI1640 (GIBCO BRL, Inc.) supplemented with 10% fetal calf serum (GIBCO BRL, Inc.) treated by Charcoal/Dextran] and plated on a Lab-TekII coverglass chamber (Nalgen Nunc, Inc.) with 8 chamber compartments in a concentration of 0.3×10⁵ cells/chamber. After culturing overnight at 37° C. under the 5% CO₂ condition, transfection was effected. For the transfection, Lipofectamine™ 2000 reagent (GIBCO BRL, Inc.) was used. First, 3.3 μl of Lipofectamine™ 2000 reagent was mixed with 80 μl of OPTI-MEM-I (GIBCO BRL, Inc.). After allowing to stand for 5 minutes, the mixture was mixed with a solution mixture of 0.72 Hg of DNA and 80 μl of OPTI-MEM-I. The mixture was left to stand at room temperature for 20 minutes, thereby to form the DNA-lipofectamine complex. After 160 μl of the solution mixture was added to the chamber above where the RINm5F cells were incubated, the cells were incubated overnight at 37° C. under the 5% CO₂ condition. Confocal laser scanning microscopic observation was performed in a manner similar to EXAMPLE 1.

[0442] As a result, it was observed that the PTH-GFP fusion protein was expressed in the cell membrane.

### Example 3

Expression of the GPCR and GFP Fusion Protein using Insulin II Promoter

[0443] In a manner similar to EXAMPLE 1, a fragment of human GPR40 (SEQ ID NO: 15) ligated with GFP at the C terminus was inserted at the downstream of mouse insulin II promoter cloned from mouse genome to prepare an expression vector for expressing the fusion protein of GPR40 and GFP (hereinafter GPR40-GFP). The expression vector plasmid for the thus obtained GPR40-GFP was transfected to MIN6 cells by the following procedures. The MIN6 cells were suspended in growth medium [DMEM (containing 4.5 g/l Glucose) (Invitrogen, Inc.) supplemented with 15% fetal calf serum (Trace, Inc.) in the final concentration, 55 μM of 2-mercaptoethanol (Invitrogen, Inc.) and 20 mM HEPES (Dainippon Pharmaceutical Co., Ltd.)] and plated on a Lab-TekII coverglass chamber (Nalgen Nunc, Inc.) with 4 chamber compartments in a concentration of 1.2×10⁵ cells/chamber. After culturing for 2 nights at 37° C. under the 5% CO₂ condition, transfection was effected. For the transfection, Lipofectamine™ 2000 reagent (GIBCO BRL, Inc.) was used. First, 4 μl of Lipofectamine™ 2000 reagent was mixed with 100 μl of Opti-MEM (Invitrogen, Inc.). After allowing to stand for 5 minutes, the mixture was mixed with a solution mixture of 2 μg of DNA and 100 μl of Opti-MEM medium. The mixture was left to stand at room temperature for 20 minutes, thereby to form the DNA-lipofectamine complex. After 100 μl of the solution mixture was added to the chamber above where the MIN6 cells were incubated, the cells were incubated for 4 hours at 37° C. under the 5% CO₂ condition. Then, the medium was replaced by 400 μl of a fresh growth medium followed by further incubation overnight. Confocal laser scanning microscopic observation was made as in EXAMPLE 1.

[0444] As a result, the GPR40-GFP fluorescent protein was observed in the cell membrane of MIN6 cells.

### Example 4

Preparation of Transformants Capable of Individually Expressing 102 Kinds of Fusion Proteins

[0445] Expression vector plasmids of 102 kinds containing the respective DNAs (SEQ ID NO: 132 through SEQ ID NO: 233) encoding the fusion proteins of 102 kinds of the respective receptor proteins for which ligands have not been identified and GFP consisting of the amino acid sequence represented by SEQ ID NO: 1 or its modified amino acid sequences were prepared, and transfected into CHO-mock cells. These CHO cells were incubated as in EXAMPLE 1. It was observed that the fusion proteins were expressed in the CHO-mock cells.

Industrial Applicability

[0446] Since various cell lines can be used, the methods of the present invention for determining ligands to receptor proteins for which ligands have not been identified are simple and can be performed in a short period of time.

The application's sequence listing, which the Patent Office published only in electronic form, follows.

SEQUENCE LISTING (233 sequences)

SEQ ID NO: 1 - protein, 239 aa, Artificial Sequence
  Variant of wild-type GFP
MASKGEELFTGVVPILVELDGDVNGHKFSVSGEGEGDATYGKLTLKFICTTGKLPVPWPTLVTTLCYGVQCFSRYPDHMKRHDFFKSAMPEGYVQERTIFFKDDGNYKTRAEVKFEGDTLVNRIELKGIDFKEDGNILGHKLEYNYNSHNVYIMADKQKNGIKVNFKTRHNIEDGSVQLADHYQQNTPIGDGPVLLPDNHYLSTQSALSKDPNEKRDHMVLLEFVTAAGITHGMDELYN

SEQ ID NO: 2 - DNA, 717 bp, Artificial Sequence
  Variant of wild-type GFP cDNA
atggctagcaaaggagaagaactcttcactggagttgtcccaattcttgttgaattagatggtgatgttaacggccacaagttctctgtcagtggagagggtgaaggtgatgcaacatacggaaaacttaccctgaagttcatctgcactactggcaaactgcctgttccatggccaacactagtcactactctgtgctatggtgttcaatgcttttcaagatacccggatcatatgaaacggcatgactttttcaagagtgccatgcccgaaggttatgtacaggaaaggaccatcttcttcaaagatgacggcaactacaagacacgtgctgaagtcaagtttgaaggtgatacccttgttaatagaatcgagttaaaaggtattgacttcaaggaagatggcaacattctgggacacaaattggaatacaactataactcacacaatgtatacatcatggcagacaaacaaaagaatggaatcaaagtgaacttcaagacccgccacaacattgaagatggaagcgttcaactagcagaccattatcaacaaaatactccaattggcgatggccctgtccttttaccagacaaccattacctgtccacacaatctgccctttcgaaagatcccaacgaaaagagagaccacatggtccttcttgagtttgtaacagctgctgggattacacatggcatggatgaactgtacaac

SEQ ID NO: 3 - protein, 238 aa, Aequorea coerulescens
MSKGEELFTGVVPILVELDGDVNGHKFSVSGEGEGDATYGKLTLKFICTTGKLPVPWPTLVTTFSYGVQCFSRYPDHMKRHDFFKSAMPEGYVQERTIFFKDDGNYKTRAEVKFEGDTLVNRIELKGIDFKEDGNILGHKLEYNYNSHNVYIMADKQKNGIKVNFKIRHNIEDGSVQLADHYQQNTPIGDGPVLLPDNHYLSTQSALSKDPNEKRDHMVLLEFVTAAGITHGMDELYK

SEQ ID NO: 4 - DNA, 714 bp, Aequorea coerulescens
atgagtaaaggagaagaacttttcactggagttgtcccaattcttgttgaattagatggtgatgttaatgggcacaaattttctgtcagtggagagggtgaaggtgatgcaacatacggaaaacttacccttaaatttatttgcactactggaaaactacctgttccatggccaacacttgtcactactttctcttatggtgttcaatgcttttcaagatacccagatcatatgaaacggcatgactttttcaagagtgccatgcccgaaggttatgtacaggaaagaactatatttttcaaagatgacgggaactacaagacacgtgctgaagtcaagtttgaaggtgatacccttgttaatagaatcgagttaaaaggtattgattttaaagaagatggaaacattcttggacacaaattggaatacaactataactcacacaatgtatacatcatggcagacaaacaaaagaatggaatcaaagttaacttcaaaattagacacaacattgaagatggaagcgttcaactagcagaccattatcaacaaaatactccaattggcgatggccctgtccttttaccagacaaccattacctgtccacacaatctgccctttcgaaagatcccaacgaaaagagagaccacatggtccttcttgagtttgtaacagctgctgggattacacatggcatggatgaactatacaaa

SEQ ID NO: 5 - protein, 238 aa, Artificial Sequence
  Variant of wild-type GFP
MSKGEELFTGVVPILVELDGDVNGHKFSVSGEGEGDATYGKLTLKFICTTGKLPVPWPTLVTTFSYGVQCFSRYPDHMKRHDFFKSAMPEGYVQERTISFKDDGNYKTRAEVKFEGDTLVNRIELKGIDFKEDGNILGHKLEYNYNSHNVYITADKQKNGIKANFKIRHNIEDGSVQLADHYQQNTPIGDGPVLLPDNHYLSTQSALSKDPNEKRDHMVLLEFVTAAGITHGMDELYK

SEQ ID NO: 6 - DNA, 714 bp, Artificial Sequence
  Variant of wild-type GFP cDNA
atgagtaaaggagaagaacttttcactggagttgtcccaattcttgttgaattagatggtgatgttaatgggcacaaattttctgtcagtggagagggtgaaggtgatgcaacatacggaaaacttacccttaaatttatttgcactactggaaaactacctgttccatggccaacacttgtcactactttctcttatggtgttcaatgcttttcccgttatccggatcatatgaaacggcatgactttttcaagagtgccatgcccgaaggttatgtacaggaacgcactatatctttcaaagatgacgggaactacaagacgcgtgctgaagtcaagtttgaaggtgatacccttgttaatcgtatcgagttaaaaggtattgattttaaagaagatggaaacattctcggacacaaactcgagtacaactataactcacacaatgtatacatcacggcagacaaacaaaagaatggaatcaaagctaacttcaaaattcgccacaacattgaagatggatccgttcaactagcagaccattatcaacaaaatactccaattggcgatggccctgtccttttaccagacaaccattacctgtcgacacaatctgccctttcgaaagatcccaacgaaaagcgtgaccacatggtccttcttgagtttgtaactgctgctgggattacacatggcatggatgagctctacaaa

SEQ ID NO: 7 - protein, 239 aa, Artificial Sequence
  Variant of wild-type GFP
MVSKGEELFTGVVPILVELDGDVNGHKFSVSGEGEGDATYGKLTLKFICTTGKLPVPWPTLVTTLTYGVQCFSRYPDHMKQHDFFKSAMPEGYVQERTIFFKDDGNYKTRAEVKFEGDTLVNRIELKGIDFKEDGNILGHKLEYNYNSHNVYIMADKQKNGIKVNFKIRHNIEDGSVQLADHYQQNTPIGDGPVLLPDNHYLSTQSALSKDPNEKRDHMVLLEFVTAAGITLGMDELYK

SEQ ID NO: 8 - DNA, 717 bp, Artificial Sequence
  Variant of wild-type GFP cDNA
atggtgagcaagggcgaggagctgttcaccggggtggtgcccatcctggtcgagctggacggcgacgtaaacggccacaagttcagcgtgtccggcgagggcgagggcgatgccacctacggcaagctgaccctgaagttcatctgcaccaccggcaagctgcccgtgccctggcccaccctcgtgaccaccctgacctacggcgtgcagtgcttcagccgctaccccgaccacatgaagcagcacgacttcttcaagtccgccatgcccgaaggctacgtccaggagcgcaccatcttcttcaaggacgacggcaactacaagacccgcgccgaggtgaagttcgagggcgacaccctggtgaaccgcatcgagctgaagggcatcgacttcaaggaggacggcaacatcctggggcacaagctggagtacaactacaacagccacaacgtctatatcatggccgacaagcagaagaacggcatcaaggtgaacttcaagatccgccacaacatcgaggacggcagcgtgcagctcgccgaccactaccagcagaacacccccatcggcgacggccccgtgctgctgcccgacaaccactacctgagcacccagtccgccctgagcaaagaccccaacgagaagcgcgatcacatggtcctgctggagttcgtgaccgccgccgggatcactctcggcatggacgagctgtacaag

SEQ ID NO: 9 - protein, 330 aa, Human
MTPNSTGEVPSPIPKGALGLSLALASLIITANLLLALGIAWDRRLRSPPAGCFFLSLLLAGLLTGLALPTLPGLWNQSRRGYWSCLLVYLAPNFSFLSLLANLLLVHGERYMAVLRPLQPPGSIRLALLLTWAGPLLFASLPALGWNHWTPGANCSSQAIFPAPYLYLEVYGLLLPAVGAAAFLSVRVLATAHRQLQDICRLERAVCRDEPSALARALTWRQARAQAGAMLLFGLCWGPYVATLLLSVLAYEQRPPLGPGTLLSLLSLGSASAAAVPVAMGLGDQRYTAPYRAAAQRCLQGLWGRASRDSPGPSIAYHPSSQSSVDLDLN

SEQ ID NO: 10 - DNA, 990 bp, Human
atgacgcccaacagcactggcgaggtgcccagccccattcccaagggggctttggggctctccctggccctggcaagcctcatcatcaccgcgaacctgctcctagccctgggcatcgcctgggaccgccgcctgcgcagcccacctgctggctgcttcttcctgagcctactgctggctgggctgctcacgggtctggcattgcccacattgccagggctgtggaaccagagtcgccggggttactggtcctgcctcctcgtctacttggctcccaacttctccttcctctccctgcttgccaacctcttgctggtgcacggggagcgctacatggcagtcctgaggccactccagccccctgggagcattcggctggccctgctcctcacctgggctggtcccctgctctttgccagtctgcccgctctggggtggaaccactggacccctggtgccaactgcagctcccaggctatcttcccagccccctacctgtacctcgaagtctatgggctcctgctgcccgccgtgggtgctgctgccttcctctctgtccgcgtgctggccactgcccaccgccagctgcaggacatctgccggctggagcgggcagtgtgccgcgatgagccctccgccctggcccgggcccttacctggaggcaggcaagggcacaggctggagccatgctgctcttcgggctgtgctgggggccctacgtggccacactgctcctctcagtcctggcctatgagcagcgcccgccactggggcctgggacactgttgtccctcctctccctaggaagtgccagtgcagcggcagtgcccgtagccatggggctgggcgatcagcgctacacagccccctggagggcagccgcccaaaggtgcctgcaggggctgtggggaagagcctcccgggacagtcccggccccagcattgcctaccacccaagcagccaaagcagtgtcgacctggacttgaac

SEQ ID NO: 11 - DNA, 30 bp, Artificial Sequence
  Designed oligonucleotide primer to amplify DNA encoding TGR5
gatgacgcccaacagcactggcgaggtgcc

SEQ ID NO: 12 - DNA, 31 bp, Artificial Sequence
  Designed oligonucleotide primer to amplify DNA encoding TGR5
ttagttcaagtccaggtcgacactgctttgg

SEQ ID NO: 13 - protein, 593 aa, Human
MGTARIAPGLALLLCCPVLSSAYALVDADDVMTKEEQIFLLHRAQAQCEKRLKEVLQRPASIMESDKGWTSASTSGKPRKDKASGKLYPESEEDKEAPTGSRYRGRPCLPEWDHILCWPLGAPGEVVAVPCPDYIYDFNHKGHAYRRCDRNGSWELVPGHNRTWANYSECVKFLTNETREREVFDRLGMIYTVGYSVSLASLTVAVLILAYFRRLHCTRNYIHMHLFLSFMLRAVSIFVKDAVLYSGATLDEAERLTEEELRAIAQAPPPPATAAAGYAGCRVAVTFFLYFLATNYYWILVEGLYLHSLIFMAFFSEKKYLWGFTVFGWGLPAVFVAVWVSVRATLANTGCWDLSSGNKKWIIQVPILASIVLNFILFINIVRVLATKLRETNAGRCDTRQQYRKLLKSTLVLMPLFGVHYIVFMATPYTEVSGTLWQVQMHYEMLFNSFQGFFVAIIYCFCNGEVQAEIKKSWSRWTLALDFKRKARSGSSSYSYGPMVSHTSVTNVGPRVGLGLPLSPRLLPTATTNGHPQLPGHAKPGTPALETLETTPPAMAAPKDDGFLNGSCSGLDEEASGPERPPALLQEEWETVM

SEQ ID NO: 14 - DNA, 1779 bp, Human
atggggaccgcccggatcgcacccggcctggcgctcctgctctgctgccccgtgctcagctccgcgtacgcgctggtggatgcagatgacgtcatgactaaagaggaacagatcttcctgctgcaccgtgctcaggcccagtgcgaaaaacggctcaaggaggtcctgcagaggccagccagcataatggaatcagacaagggatggacatctgcgtccacatcagggaagcccaggaaagataaggcatctgggaagctctaccctgagtctgaggaggacaaggaggcacccactggcagcaggtaccgagggcgcccctgtctgccggaatgggaccacatcctgtgctggccgctgggggcaccaggtgaggtggtggctgtgccctgtccggactacatttatgacttcaatcacaaaggccatgcctaccgacgctgtgaccgcaatggcagctgggagctggtgcctgggcacaacaggacgtgggccaactacagcgagtgtgtcaaatttctcaccaatgagactcgtgaacgggaggtgtttgaccgcctgggcatgatttacaccgtgggctactccgtgtccctggcgtccctcaccgtagctgtgctcatcctggcctactttaggcggctgcactgcacgcgcaactacatccacatgcacctgttcctgtccttcatgctgcgcgccgtgagcatcttcgtcaaggacgctgtgctctactctggcgccacgcttgatgaggctgagcgcctcaccgaggaggagctgcgcgccatcgcccaggcgcccccgccgcctgccaccgccgctgccggctacgcgggctgcagggtggctgtgaccttcttcctttacttcctggccaccaactactactggattctggtggaggggctgtacctgcacagcctcatcttcatggccttcttctcagagaagaagtacctgtggggcttcacagtcttcggctggggtctgcccgctgtcttcgtggctgtgtgggtcagtgtcagagctaccctggccaacaccgggtgctgggacttgagctccgggaacaaaaagtggatcatccaggtgcccatcctggcctccattgtgctcaacttcatcctcttcatcaatatcgtccgggtgctcgccaccaagctgcgggagaccaacgccggccggtgtgacacacggcagcagtaccggaagctgctcaaatccacgctggtgctcatgcccctctttggcgtccactacattgtcttcatggccacaccatacaccgaggtctcagggacgctctggcaagtccagatgcactatgagatgctcttcaactccttccagggattttttgtcgcaatcatatactgtttctgcaatggcgaggtacaagctgagatcaagaaatcttggagccgctggacactggcactggacttcaagcgaaaggcacgcagcgggagcagcagctatagctacggccccatggtgtcccacacaagtgtgaccaatgtcggcccccgtgtgggactcggcctgcccctcagcccccgcctactgcccactgccaccaccaacggccaccctcagctgcctggccatgccaagccagggaccccagccctggagaccctcgagaccacaccacctgccatggctgctcccaaggacgatgggttcctcaacggctcctgctcaggcctggacgaggaggcctctgggcctgagcggccacctgccctgctacaggaagagtgggagacagtcatg

SEQ ID NO: 15 - protein, 300 aa, Human
MDLPPQLSFGLYVAAFALGFPLNVLAIRGATAHARLRLTPSLVYALNLGCSDLLLTVSLPLKAVEALASGAWPLPASLCPVFAVAHFFPLYAGGGFLAALSAGRYLGAAFPLGYQAFRRPCYSWGVCAAIWALVLCHLGLVFGLEAPGGWLDHSNTSLGINTPVNGSPVCLEAWDPASAGPARFSLSLLLFFLPLAITAFCYVGCLRALARSGLTHRRKLRAAWVAGGALLTLLLCVGPYNASNVASFLYPNLGGSWRKLGLITGAWSVVLNPLVTGYLGRGPGLKTVCAARTQGGKSQK

SEQ ID NO: 16 - DNA, 900 bp, Human
atggacctgcccccgcagctctccttcggcctctatgtggccgcctttgcgctgggcttcccgctcaacgtcctggccatccgaggcgcgacggcccacgcccggctccgtctcacccctagcctggtctacgccctgaacctgggctgctccgacctgctgctgacagtctctctgcccctgaaggcggtggaggcgctagcctccggggcctggcctctgccggcctcgctgtgccccgtcttcgcggtggcccacttcttcccactctatgccggcgggggcttcctggccgccctgagtgcaggccgctacctgggagcagccttccccttgggctaccaagccttccggaggccgtgctattcctggggggtgtgcgcggccatctgggccctcgtcctgtgtcacctgggtctggtctttgggttggaggctccaggaggctggctggaccacagcaacacctccctgggcatcaacacaccggtcaacggctctccggtctgcctggaggcctgggacccggcctctgccggcccggcccgcttcagcctctctctcctgctcttttttctgcccttggccatcacagccttctgctacgtgggctgcctccgggcactggcccgctccggcctgacgcacaggcggaagctgcgggccgcctgggtggccggcggggccctcctcacgctgctgctctgcgtaggaccctacaacgcctccaacgtggccagcttcctgtaccccaatctaggaggctcctggcggaagctggggctcatcacgggtgcctggagtgtggtgcttaatccgctggtgaccggttacttgggaaggggtcctggcctgaagacagtgtgtgcggcaagaacgcaagggggcaagtcccagaag

SEQ ID NO: 17 - protein, 6 aa, Artificial sequence
  His-tag
HHHHHH

SEQ ID NO: 18 - protein, 14 aa, Artificial sequence
  V5-tag
GKPIPNPLLGLDST

SEQ ID NO: 19 - protein, 10 aa, Artificial sequence
  myc-tag
EQKLISEEDL

SEQ ID NO: 20 - protein, 8 aa, Artificial sequence
  Xpress-tag
DLYDDDDK

SEQ ID NO: 21 - protein, 16 aa, Artificial sequence
  HA-tag
MGSYPYDVPDYASLEF

SEQ ID NO: 22 - protein, 239 aa, Artificial sequence
  Variant of wild-type GFP
MVSKGEELFTGVVPILVELDGDVNGHKFSVSGEGEGDATYGKLTLKFICTTGKLPVPWPTLVTTLTWGVQCFSRYPDHMKQHDFFKSAMPEGYVQERTIFFKDDGNYKTRAEVKFEGDTLVNRIELKGIDFKEDGNILGHKLEYNYISHNVYITADKQKNGIKANFKIRHNIEDGSVQLADHYQQNTPIGDGPVLLPDNHYLSTQSALSKDPNEKRDHMVLLEFVTAAGITLGMDELYK

SEQ ID NO: 23 - DNA, 720 bp, Artificial sequence
  Variant of wild-type GFP cDNA
atggtgagcaagggcgaggagctgttcaccggggtggtgcccatcctggtcgagctggacggcgacgtaaacggccacaagttcagcgtgtccggcgagggcgagggcgatgccacctacggcaagctgaccctgaagttcatctgcaccaccggcaagctgcccgtgccctggcccaccctcgtgaccaccctgacctggggcgtgcagtgcttcagccgctaccccgaccacatgaagcagcacgacttcttcaagtccgccatgcccgaaggctacgtccaggagcgcaccatcttcttcaaggacgacggcaactacaagacccgcgccgaggtgaagttcgagggcgacaccctggtgaaccgcatcgagctgaagggcatcgacttcaaggaggacggcaacatcctggggcacaagctggagtacaactacatcagccacaacgtctatatcaccgccgacaagcagaagaacggcatcaaggccaacttcaagatccgccacaacatcgaggacggcagcgtgcagctcgccgaccactaccagcagaacacccccatcggcgacggccccgtgctgctgcccgacaaccactacctgagcacccagtccgccctgagcaaagaccccaacgagaagcgcgatcacatggtcctgctggagttcgtgaccgccgccgggatcactctcggcatggacgagctgtacaagtaa

SEQ ID NO: 24 - protein, 239 aa, Artificial sequence
  Variant of wild-type GFP
MVSKGEELFTGVVPILVELDGDVNGHKFSVSGEGEGDATYGKLTLKFICTTGKLPVPWPTLVTTFGYGLQCFARYPDHMKQHDFFKSAMPEGYVQERTIFFKDDGNYKTRAEVKFEGDTLVNRIELKGIDFKEDGNILGHKLEYNYNSHNVYIMADKQKNGIKVNFKIRHNIEDGSVQLADHYQQNTPIGDGPVLLPDNHYLSYQSALSKDPNEKRDHMVLLEFVTAAGITLGMDELYK

SEQ ID NO: 25 - DNA, 720 bp, Artificial sequence
  Variant of wild-type GFP cDNA
atggtgagcaagggcgaggagctgttcaccggggtggtgcccatcctggtcgagctggacggcgacgtaaacggccacaagttcagcgtgtccggcgagggcgagggcgatgccacctacggcaagctgaccctgaagttcatctgcaccaccggcaagctgcccgtgccctggcccaccctcgtgaccaccttcggctacggcctgcagtgcttcgcccgctaccccgaccacatgaagcagcacgacttcttcaagtccgccatgcccgaaggctacgtccaggagcgcaccatcttcttcaaggacgacggcaactacaagacccgcgccgaggtgaagttcgagggcgacaccctggtgaaccgcatcgagctgaagggcatcgacttcaaggaggacggcaacatcctggggcacaagctggagtacaactacaacagccacaacgtctatatcatggccgacaagcagaagaacggcatcaaggtgaacttcaagatccgccacaacatcgaggacggcagcgtgcagctcgccgaccactaccagcagaacacccccatcggcgacggccccgtgctgctgcccgacaaccactacctgagctaccagtccgccctgagcaaagaccccaacgagaagcgcgatcacatggtcctgctggagttcgtgaccgccgccgggatcactctcggcatggacgagctgtacaagtaa

SEQ ID NO: 26 - protein, 225 aa, Discosoma sp.
MRSSKNVIKEFMRFKVRMEGTVNGHEFEIEGEGEGRPYEGHNTVKLKVTKGGPLPFAWDILSPQFQYGSKVYVKHPADIPDYKKLSFPEGFKWERVMNFEDGGVVTVTQDSSLQDGCFIYKVKFIGVNFPSDGPVMQKKTMGWEASTERLYPRDGVLKGEIHKALKLKDGGHYLVEFKSIYMAKKPVQLPGYYYVDSKLDITSHNEDYTIVEQYERTEGRHHLFL

SEQ ID NO: 27 - DNA, 678 bp, Discosoma sp.
atgaggtcttccaagaatgttatcaaggagttcatgaggtttaaggttcgcatggaaggaacggtcaatgggcacgagtttgaaatagaaggcgaaggagaggggaggccatacgaaggccacaataccgtaaagcttaaggtaaccaaggggggacctttgccatttgcttgggatattttgtcaccacaatttcagtatggaagcaaggtatatgtcaagcaccctgccgacataccagactataaaaagctgtcatttcctgaaggatttaaatgggaaagggtcatgaactttgaagacggtggcgtcgttactgtaacccaggattccagtttgcaggatggctgtttcatctacaaggtcaagttcattggcgtgaactttccttccgatggacctgttatgcaaaagaagacaatgggctgggaagccagcactgagcgtttgtatcctcgtgatggcgtgttgaaaggagagattcataaggctctgaagctgaaagacggtggtcattacctagttgaattcaaaagtatttacatggcaaagaagcctgtgcagctaccagggtactactatgttgactccaaactggatataacaagccacaacgaagactatacaatcgttgagcagtatgaaagaaccgagggacgccaccatctgttcctttag

SEQ ID NO: 28 - protein, 239 aa, Artificial sequence
  Variant of wild-type GFP
MVSKGEELFTGVVPILVELDGDVNGHKFSVSGEGEGDATYGKLTLKFICTTGKLPVPWPTLVTTLTHGVQCFSRYPDHMKQHDFFKSAMPEGYVQERTIFFKDDGNYKTRAEVKFEGDTLVNRIELKGIDFKEDGNILGHKLEYNFNSHNVYIMADKQKNGIKVNFKIRHNIEDGSVQLADHYQQNTPIGDGPVLLPDNHYLSTQSALSKDPNEKRDHMVLLEFVTAAGITLGMDELYK

SEQ ID NO: 29 - DNA, 720 bp, Artificial sequence
  Variant of wild-type GFP cDNA
atggtgagcaagggcgaggagctgttcaccggggtggtgcccatcctggtcgagctggacggcgacgtaaacggccacaagttcagcgtgtccggcgagggcgagggcgatgccacctacggcaagctgaccctgaagttcatctgcaccaccggcaagctgcccgtgccctggcccaccctcgtgaccaccctgacccacggcgtgcagtgcttcagccgctaccccgaccacatgaagcagcacgacttcttcaagtccgccatgcccgaaggctacgtccaggagcgcaccatcttcttcaaggacgacggcaactacaagacccgcgccgaggtgaagttcgagggcgacaccctggtgaaccgcatcgagctgaagggcatcgacttcaaggaggacggcaacatcctggggcacaagctggagtacaacttcaacagccacaacgtctatatcatggccgacaagcagaagaacggcatcaaggtgaacttcaagatccgccacaacatcgaggacggcagcgtgcagctcgccgaccactaccagcagaacacccccatcggcgacggccccgtgctgctgcccgacaaccactacctgagcacccagtccgccctgagcaaagaccccaacgagaagcgcgatcacatggtcctgctggagttcgtgaccgccgccgggatcactctcggcatggacgagctgtacaagtaa

SEQ ID NO: 30 - protein, 544 aa, Human [sequence omitted]

SEQ ID NO: 31 - protein, 612 aa, Human [sequence omitted]

SEQ ID NO: 32 - protein, 599 aa, Human [sequence omitted]

SEQ ID NO: 33 - protein, 890 aa, Human [sequence omitted]

SEQ ID NO: 34 - protein, 598 aa, Human [sequence omitted]

SEQ ID NO: 35 - protein, 557 aa, Human [sequence omitted]

SEQ ID NO: 36 - protein, 641 aa, Human [sequence omitted]

SEQ ID NO: 37 - protein, 581 aa, Human [sequence omitted]

SEQ ID NO: 38 - protein, 1252 aa, Human [sequence omitted]

SEQ ID NO: 39 - protein, 655 aa, Human [sequence omitted]

SEQ ID NO: 40 - protein, 573 aa, Human [sequence omitted]

SEQ ID NO: 41 - protein, 920 aa, Human [sequence omitted]

SEQ ID NO: 42 - protein, 766 aa, Human [sequence omitted]

SEQ ID NO: 43 - protein, 1124 aa, Human [sequence omitted]

SEQ ID NO: 44 - protein, 599 aa, Human [sequence omitted]

SEQ ID NO: 45 - protein, 557 aa, Human [sequence omitted]

SEQ ID NO: 46 - protein, 708 aa, Human [sequence omitted]

SEQ ID NO: 47 - protein, 637 aa, Human [sequence omitted]

SEQ ID NO: 48 - protein, 657 aa, Human [sequence omitted]

SEQ ID NO: 49 - protein, 611 aa, Human
MANTTGEPEEVSGALSPPSASAYVKLVLLGLIMCVSLAGNAILSLLVLKERALHKAPYYFLLDLCLADGIRSAVCFPFVLASVRHGSSWTFSALSCKIVAFMAVLFCFHAAFMLFCISVTRYMAIAHHRFYAKRMTLWTCAAVICMAWTLSVAMAFPPVFDVGTYKFIREEDQCIFEHRYFKANDTLGFMLMLAVLMAATHAVYGKLLLFEYRHRKMKPVQMVPAISQNWTFHGPGATGQAAANWIAGFGRGPMPPTLLGIRQNGHAASRRLLGMDEVKGEKQLGRMFYAITLLFLLLWSPYIVACYWRVFVKACAVPHRYLATAVWMSFAQAAVNPIVCFLLNKDLKKCLRTHAPCWGTGGAPAPREPYCVMASKGEELFTGVVPILVELDGDVNGHKFSVSGEGEGDATYGKLTLKFICTTGKLPVPWPTLVTTLCYGVQCFSRYPDHMKRHDFFKSAMPEGYVQERTIFFKDDGNYKTRAEVKFEGDTLVNRIELKGIDFKEDGNILGHKLEYNYNSHNVYIMADKQKNGIKVNFKTRHNIEDGSVQLADHYQQNTPIGDGPVLLPDNHYLSTQSALSKDPNEKRDHMVLLEFVTAAGITHGMDELYN

SEQ ID NO: 50 - protein, 798 aa, Human [sequence omitted]

SEQ ID NO: 51 - protein, 557 aa, Human [sequence omitted]

SEQ ID NO: 52 - protein, 596 aa, Human [sequence omitted]

SEQ ID NO: 53 - protein, 572 aa, Human [sequence omitted]

SEQ ID NO: 54 - protein, 575 aa, Human [sequence omitted]

SEQ ID NO: 55 - protein, 580 aa, Human [sequence omitted]

SEQ ID NO: 56 - protein, 583 aa, Human [sequence omitted]

SEQ ID NO: 57 - protein, 851 aa, Human [sequence omitted]

SEQ ID NO: 58 - protein, 895 aa, Human [sequence omitted]

SEQ ID NO: 59 - protein, 1148 aa, Human [sequence omitted]

SEQ ID NO: 60 - protein, 642 aa, Human [sequence omitted]

SEQ ID NO: 61 - protein, 653 aa, Human [sequence omitted]

SEQ ID NO: 62 - protein, 610 aa, Human [sequence omitted]

SEQ ID NO: 63 - protein, 583 aa, Human [sequence omitted]

SEQ ID NO: 64 - protein, 1205 aa, Human [sequence omitted]

SEQ ID NO: 65 - protein, 573 aa, Human [sequence omitted]

SEQ ID NO: 66 - protein, 612 aa, Human [sequence omitted]

SEQ ID NO: 67 - protein, 611 aa, Human [sequence omitted]

SEQ ID NO: 68 - protein, 671 aa, Human
MCFSPILEINMQSESNITVRDDIDDINTNMYQPLSYPLSFQVSLTGFLMLEIVLGLGSNLTVLVLYCMKSNLINSVSNIITMNLHVLDVIICVGCIPLTIVILLLSLESNTALICCFHEACVSFASVSTAINVFAITLDRYDISVKPANRILTMGRAVMLMISIWIFSFFSFLIPFIEVNFFSLQSGNTWENKTLLCVSTNEYYTELGMYYHLLVQIPIFFFTVVVMLITYTKILQALNIRIGTRFSTGQKKKARKKKTISLTTQHEATDMSQSSGGRNVVFGVRTSVSVIIALRRAVKRHRERRERQKRVFRMSLLIISTFLLCWTPISVLNTTILCLGPSDLLVKLRLCFLVMAYGTTIFHPLLYAFTRQKFQKVLKSKMKKRVVSIVEADPLPNNAVIHNSWIDPKRNKKITFEDSEIREKCLVPQVVTDASKGEELFTGVVPILVELDGDVNGHKFSVSGEGEGDATYGKLTLKFICTTGKLPVPWPTLVTTLCYGVQCFSRYPDHMKRHDFFKSAMPEGYVQERTIFFKDDGNYKTRAEVKFEGDTLVNRIELKGIDFKEDGNILGHKLEYNYNSHNVYIMADKQKNGIKVNFKTRHNIEDGSVQLADHYQQNTPIGDGPVLLPDNHYLSTQSALSKDPNEKRDHMVLLEFVTAAGITHGMDELYN

SEQ ID NO: 69 - protein, 599 aa, Human [sequence omitted]

SEQ ID NO: 70 - protein, 575 aa, Human [sequence omitted]

SEQ ID NO: 71 - protein, 727 aa, Human [sequence omitted]

SEQ ID NO: 72 - protein, 616 aa, Human [sequence omitted]

SEQ ID NO: 73 - protein, 608 aa, Human
MANYSHAADNILQNLSPLTAFLKLTSLGFIIGVSVVGNLLISILLVKDKTLHRAPYYFLLDLCCSDILRSAICFPFVFNSVKNGSTWTYGTLTCKVIAFLGVLSCFHTAFMLFCISVTRYLAIAHHRFYTKRLTFWTCLAVICMVWTLSVAMAFPPVLDVGTYSFIREEDQCTFQHRSFRANDSLGFMLLLALILLATQLVYLKLIFFVHDRRKMKPVQFVAAVSQNWTFHGPGASGQAAANWLAGFGRGPTPPTLLGIRQNANTTGRRRLLVLDEFKMEKRISRMFYIMTFLFLTLWGPYLVACYWRVFARGPVVPGGFLTAAVWMSFAQAGINPFVCIFSNRELRRCFSTTLLYCRKSRLPREPYCVISRKGEELFTGVVPILVELDGDVNGHKFSVSGEGEGDATYGKLTLKFICTTGKLPVPWPTLVTTLCYGVQCFSRYPDHMKRHDFFKSAMPEGYVQERTIFFKDDGNYKTRAEVKFEGDTLVNRIELKGIDFKEDGNILGHKLEYNYNSHNVYIMADKQKNGIKVNFKTRHNIEDGSVQLADHYQQNTPIGDGPVLLPDNHYLSTQSALSKDPNEKRDHMVLLEFVTAAGITHGMDELYN

SEQ ID NO: 74 - protein, 572 aa, Human [sequence omitted]

SEQ ID NO: 75 - protein, 613 aa, Human [sequence omitted]

SEQ ID NO: 76 - protein, 574 aa, Human [sequence omitted]

SEQ ID NO: 77 - protein, 1061 aa, Human [sequence omitted]

SEQ ID NO: 78 - protein, 753 aa, Human [sequence omitted]

SEQ ID NO: 79 - protein, 600 aa, Human [sequence omitted]

SEQ ID NO: 80 - protein, 672 aa, Human [sequence omitted]

SEQ ID NO: 81 - protein, 542 aa, Human [sequence omitted]

SEQ ID NO: 82 - protein, 571 aa, Human [sequence omitted]

SEQ ID NO: 83 - protein, 577 aa, Human [sequence omitted]

SEQ ID NO: 84 - protein, 547 aa, Human [sequence omitted]

SEQ ID NO: 85 - protein, 679 aa, Human [sequence omitted]

SEQ ID NO: 86 - protein, 625 aa, Human [sequence omitted]

SEQ ID NO: 87 - protein, 778 aa, Human [sequence omitted]

SEQ ID NO: 88 - protein, 584 aa, Human [sequence omitted]

SEQ ID NO: 89 - protein, 585 aa, Human [sequence omitted]

SEQ ID NO: 90 - protein, 611 aa, Human [sequence omitted]

SEQ ID NO: 91 - protein, 591 aa, Rat
MEVSREMLFEELDNYSYALEYYSQEPDAEENVYPGIVHWISLLLYALAFVLGIPGNAIVIWFMGFKWKKTVTTLWFLNLAIADFVFVLFLPLYISYVALSFHWPFGRWLCKLNSFIAQLNMFSSVFFLTVISLDRYIHLIHPGLSHPHRTLKNSLLVVLFVWLLASLLGGPTLYFRDTVEVNNRIICYNNFQEYELTLMRHHVLTWVKFLFGYLLPLLTMSSCYLCLIFKTKKQNILISSKHLWMILSVVIAFMVCWTPFHLFSIWELSIHHNSSFQNVLQGGIPLSTGLAFLNSCLNPILYVLISKKFQARFRASVAEVLKRSLWEASCSGTVSEQLRSAETKSLSLLETAQASKGEELFTGVVPILVELDGDVNGHKFSVSGEGEGDATYGKLTLKFICTTGKLPVPWPTLVTTLCYGVQCFSRYPDHMKRHDFFKSAMPEGYVQERTIFFKDDGNYKTRAEVKFEGDTLVNRIELKGIDFKEDGNILGHKLEYNYNSHNVYIMADKQKNGIKVNFKTRHNIEDGSVQLADHYQQNTPIGDGPVLLPDNHYLSTQSALSKDPNEKRDHMVLLEFVTAAGITHGMDELYN

SEQ ID NO: 92 - protein, 568 aa, Human
MMWGAGSPLAWLSAGSGNVNVSSVGPAEGPTGPAAPLPSPKAWDVVLCISGTLVSCENALVVAIIVGTPAFRAPMFLLVGSLAVADLLAGLGLVLHFAAVFCIGSAEMSLVLVGVLAMAFTASIGSLLAITVDRYLSLYNALTYYSETTVTRTYVMLALVWGGALGLGLLPVLAWNCLDGLTTCGVVYPLSKNHLVVLAIAFFMVFGIMLQLYAQICRIVCRHAQQIALQRHLLPASHYVATRKGIATLAVVLGAFAACWLPFTVYCLLGDAHSPPLYTYLTLLPATYNSMINPIIYAFRNQDVQKVLWAVCCCCSSSKIPFRSRSPSDVASKGEELFTGVVPILVELDGDVNGHKFSVSGEGEGDATYGKLTLKFICTTGKLPVPWPTLVTTLCYGVQCFSRYPDHMKRHDFFKSAMPEGYVQERTIFFKDDGNYKTRAEVKFEGDTLVNRIELKGIDFKEDGNILGHKLEYNYNSHNVYIMADKQKNGIKVNFKTRHNIEDGSVQLADHYQQNTPIGDGPVLLPDNHYLSTQSALSKDPNEKRDHMVLLEFVTAAGITHGMDELYN

SEQ ID NO: 93 - protein, 600 aa, Human [sequence omitted]

SEQ ID NO: 94 - protein, 595 aa, Human [sequence omitted]

SEQ ID NO: 95 - protein, 657 aa, Human
MLAAAFADSNSSSMNVSFAHLHFAGGYLPSDSQDWRTIIPALLVAVCLVGFVGNLCVIGILLHNAWKGKPSMIHSLILNLSLADLSLLLFSAPIRATAYSKSVWDLGWFVCKSSDWFIHTCMAAKSLTIVVVAKVCFMYASDPAKQVSIHNYTIWSVLVAIWTVASLLPLPEWFFSTIRHHEGVEMCLVDVPAVAEEFMSMFGKLYPLLAFGLPLFFASFYFWRAYDQCKKRGTKTQNLRNQIRSKQVTVMLLSIAIISALLWLPEWVAWLWVWHLKAAGPAPPQGFIALSQVLMFSISSANPLIFLVMSEEFREGLKGVWKWMITKKPPTVSESQETPAGNSEGLPDKVPSPESPASIPEKEKPSSPSSGKGKTEKAEIPILPDVEQFWHERDTVPSVQDNDPIPWEHEDQETGEGVKTSKGEELFTGVVPILVELDGDVNGHKFSVSGEGEGDATYGKLTLKFICTTGKLPVPWPTLVTTLCYGVQCFSRYPDHMKRHDFFKSAMPEGYVQERTIFFKDDGNYKTRAEVKFEGDTLVNRIELKGIDFKEDGNILGHKLEYNYNSHNVYIMADKQKNGIKVNFKTRHNIEDGSVQLADHYQQNTPIGDGPVLLPDNHYLSTQSALSKDPNEKRDHMVLLEFVTAAGITHGMDELYN

SEQ ID NO: 96 - protein, 657 aa, Human [sequence omitted]

SEQ ID NO: 97 - protein, 1232 aa, Human [sequence omitted]

SEQ ID NO: 98 - protein, 931 aa, Human [sequence omitted]

SEQ ID NO: 99 - protein, 1584 aa, Human [sequence omitted]

SEQ ID NO: 100 - protein, 645 aa, Human [sequence omitted]

SEQ ID NO: 101 - protein, 637 aa, Human [sequence omitted]

SEQ ID NO: 102 - protein, 613 aa, Human
MANASEPGGSGGGEAAALGLKLATLSLLLCVSLAGNVLFALLIVRERSLHRAPYYLLLDLCLADGLRALACLPAVMLAARRAAAAAGAPPGALGCKLLAFLAALFCFHAAFLLLGVGVTRYLAIAHHRFYAERLAGWPCAAMLVCAAWALALAAAFPPVLDGGGDDEDAPCALEQRPDGAPGALGFLLLLAVVVGATHLVYLRLLFFIHDRRKMRPARLVPAVSHDWTFHGPGATGQAAANWTAGFGRGPTPPALVGIRPAGPGRGARRLLVLEEFKTEKRLCKMFYAVTLLFLLLWGPYVVASYLRVLVRPGAVPQAYLTASVWLTFAQAGINPVVCFLFNRELRDCFRAQFPCCQSPRTTQATHPCDLKGIGLASKGEELFTGVVPILVELDGDVNGHKFSVSGEGEGDATYGKLTLKFICTTGKLPVPWPTLVTTLCYGVQCFSRYPDHMKRHDFFKSAMPEGYVQERTIFFKDDGNYKTRAEVKFEGDTLVNRIELKGIDFKEDGNILGHKLEYNYNSHNVYIMADKQKNGIKVNFKTRHNIEDGSVQLADHYQQNTPIGDGPVLLPDNHYLSTQSALSKDPNEKRDHMVLLEFVTAAGITHGMDELYN

SEQ ID NO: 103 - protein, 1145 aa, Human [sequence omitted]

SEQ ID NO: 104 - protein, 560 aa, Human [sequence omitted]

SEQ ID NO: 105 - protein, 568 aa, Human [sequence omitted]

SEQ ID NO: 106 - protein, 550 aa, Human [sequence omitted]

SEQ ID NO: 107 - protein, 561 aa, Human [sequence omitted]

SEQ ID NO: 108 - protein, 591 aa, Human
MEHTHAHLAANSSLSWWSPGSACGLGFVPVVYYSLLLCLGLPANILTVIILSQLVARRQKSSYNYLLALAAADILVLFFIVFVDFLLEDFILNMQMPQVPDKIIEVLEFSSIHTSIWITVPLTIDRYIAVCHPLKYHTVSYPARTRKVIVSVYITCFLTSIPYYWWPNIWTEDYISTSVHHVLIWIHCFTVYLVPCSIFFILNSIIVYKLRRKSNFRLRGYSTGKTTAILFTITSIFATLWAPRIIMILYHLYGAPIQNRWLVHIMSDIANMLALLNTAINFFLYCFISKRFRTMAAATLKAFFKCQKQPVQFYTNHNFSITSSPWISPANSHCIKMLVYQYDKNGKPIKVSPSSKGEELFTGVVPILVELDGDVNGHKFSVSGEGEGDATYGKLTLKFICTTGKLPVPWPTLVTTLCYGVQCFSRYPDHMKRHDFFKSAMPEGYVQERTIFFKDDGNYKTRAEVKFEGDTLVNRIELKGIDFKEDGNILGHKLEYNYNSHNVYIMADKQKNGIKVNFKTRHNIEDGSVQLADHYQQNTPIGDGPVLLPDNHYLSTQSALSKDPNEKRDHMVLLEFVTAAGITHGMDELYN

SEQ ID NO: 109 - protein, 596 aa, Human [sequence omitted]

SEQ ID NO: 110 - protein, 543 aa, Human [sequence omitted]

SEQ ID NO: 111 - protein, 577 aa, Human [sequence omitted]

SEQ ID NO: 112 - protein, 569 aa, Human [sequence omitted]

SEQ ID NO: 113 - protein, 787 aa, Human [sequence omitted]

SEQ ID NO: 114 - protein, 608 aa, Human [sequence omitted]

SEQ ID NO: 115 - protein, 577 aa, Human [sequence omitted]

SEQ ID NO: 116 - protein, 851 aa, Human [sequence omitted]

SEQ ID NO: 117 - protein, 719 aa, Human [sequence omitted]

SEQ ID NO: 118 - protein, 591 aa, Human [sequence omitted]

SEQ ID NO: 119 - protein, 594 aa, Human [sequence omitted]

SEQ ID NO: 120 - protein, 1459 aa, Human [sequence omitted]

SEQ ID NO: 121 - protein, 637 aa, Human [sequence omitted]

SEQ ID NO: 122 - protein, 691 aa, Human [sequence omitted]

SEQ ID NO: 123 - protein, 661 aa, Human [sequence omitted]

SEQ ID NO: 124 - protein, 634 aa, Human [sequence omitted]

SEQ ID NO: 125 - protein, 587 aa, Human
MNSTLDGNQSSHPFCLLAFGYLETVNFCLLEVLIIVFLTVLIISGNIIVIFVFHCAPLLNHHTTSYFIQTMAYADLFVGVSCVVPSLSLLHHPLPVEESLTCQIFGFVVSVLKSVSMASLACISIDRYIAITKPLTYNTLVTPWRLRLCIFLIWLYSTLVFLPSFFHWGKPGYHGDVFQWCAESWHTDSYFTLFIVMMLYAPAALIVCFTYFNIFRICQQHTKDISERQARFSSQSGETGEVQACPDKRYAMVLFRITSVFYILWLPYIIYFLLESSTGHSNRFASFLTTWLAISNSFCNCVIYSLSNSVFQRGLKRLSGAMCTSCASQTTANDPYTVRSKGPLNGCHIASKGEELFTGVVPILVELDGDVNGHKFSVSGEGEGDATYGKLTLKFICTTGKLPVPWPTLVTTLCYGVQCFSRYPDHMKRHDFFKSAMPEGYVQERTIFFKDDGNYKTRAEVKFEGDTLVNRIELKGIDFKEDGNILGHKLEYNYNSHNVYIMADKQKNGIKVNFKTRHNIEDGSVQLADHYQQNTPIGDGPVLLPDNHYLSTQSALSKDPNEKRDHMVLLEFVTAAGITHGMDELYN

SEQ ID NO: 126 - protein, 1189 aa, Human [sequence omitted]

SEQ ID NO: 127 - protein, 586 aa, Human [sequence omitted]

SEQ ID NO: 128 - protein, 1810 aa, Human
MTPACPLLLSVILSLRLATAFDPAPSACSALASGVLYGAFSLQDLFPTIASGCSWTLENPDPTKYSLYLRFNRQEQVCAHFAPRLLPLDHYLVNFTCLRPSPEEAVAQAESEVGRPEEEEAEAAAGLELCSGSGPFTFLHFDKNFVQLCLSAEPSEAPRLLAPAALAFRFVEVLLINNNNSSQFTCGVLCRWSEECGRAAGRACGFAQPGCSCPGEAGAGSTTTTSPGPPAAHTLSNALVPGGPAPPAEADLHSGSSNDLFTTEMRYGEEPEEEPKVKTQWPRSADEPGLYMAQTGDPAAEEWSPWSVCSLTCGQGLQVRTRSCVSSPYGTLCSGPLRETRPCNNSATCPVHGVWEEWGSWSLCSRSCGRGSRSRMRTCVPPQHGGKACEGPELQTKLCSMAACPVEGQWLEWGPWGPCSTSCANGTQQRSRKCSVAGPAWATCTGALTDTRECSNLECPATDSKWGPWNAWSLCSKTCDTGWQRRFRMCQATGTQGYPCEGTGEEVKPCSEKRCPAFHEMCRDEYVMLMTWKKAAAGEIIYNKCPPNASGSASRRCLLSAQGVAYWGLPSFARCISHEYRYLYLSLREHLAKGQRMLAGEGMSQVVRSLQELLARRTYYSGDLLFSVDILRNVTDTFKRATYVPSADDVQRFFQVVSFMVDAENKEKWDDAQQVSPGSVHLLRVVEDFIHLVGDALKAFQSSLIVTDNLVISIQREPVSAVSSDITFPMRGRRGMKDWVRHSEDRLFLPKEVLSLSSPGKPATSGAAGSPGRGRGPGTVPPGPGHSHQRLLPADPDESSYFVIGAVLYRTLGLILPPPRPPLAVTSRVMTVTVRPPTQPPAEPLITVELSYIINGTTDPHCASWDYSRADASSGDWDTENCQTLETQAAHTRCQCQHLSTFAVLAQPPKDLTLELAGSPSVPLVIGCAVSCMALLTLLAIYAAFWRFIKSERSIILLNFCLSILASNILILVGQSRVLSKGVCTMTAAFLHFFFLSSFCWVLTEAWQSYLAVIGRMRTRLVRKRFLCLGWGLPALVVAVSVGFTRTKGYGTSSYCWLSLEGGLLYAFVGPAAVIVLVNMLIGIIVFNKLMARDGISDKSKKQRAGSERCPWASLLLPCSACGAVPSPLLSSASARNAMASLWSSCVVLPLLALTWMSAVLAMTDRRSVLFQALFAVFNSAQGFVITAVHCFLRREVQDVVKCQMGVCRADESEDSPDSCKNGQLQILSDFEKDVDLACQTVLFKEVNTCNPSTITGTLSRLSLDEDEEPKSCLVGPEGSLSFSPLPGNILVPMAASPGLGEPPPPQEANPVYMCGEGGLRQLDLTWLRPTEPGSEGDYMVLPRRTLSLQPGGGGGGGEDAPRARPEGTPRRAAKTVAHTEGYPSFLSVDHSGLGLGPAYGSLQNPYGMTFQPPPPTPSARQVPEPGERSRTMPRTVPGSTMKMGSLERKKLRYSDLDFEVMHTRKRHSELYHELNQKFHTFDRYRSQSTAKREKRWSVSSGGAAERSVCTDKPSPGERPSLSQHRRHQSWSTFKSMTLGSLPPKPRERLTLHRAAAWEPTEPPDGDFQTEVASKGEELFTGVVPILVELDGDVNGHKFSVSGEGEGDATYGKLTLKFICTTGKLPVPWPTLVTTLCYGVQCFSRYPDHMKRHDFFKSAMPEGYVQERTIFFKDDGNYKTRAEVKFEGDTLVNRIELKGIDFKEDGNILGHKLEYNYNSHNVYIMADKQKNGIKVNFKTRHNIEDGSVQLADHYQQNTPIGDGPVLLPDNHYLSTQSALSKDPNEKRDHMVLLEFVTAAGITHGMDELYN

SEQ ID NO: 129 - protein, 563 aa, Human [sequence omitted]

SEQ ID NO: 130 - protein, 707 aa, Human [sequence omitted]

SEQ ID NO: 131 - protein, 746 aa, Human [sequence omitted]

SEQ ID NO: 132 - DNA, 1635 bp, Human
atgtattcatttatggcaggatccatattcatcacaatatttggcaatcttgccatgataatttccatttcctacttcaagcagcttcacacaccaaccaacttcctcatcctctccatggccatcactgatttcctcctgggattcaccatcatgccatatagtatgatcagatcggtggagaactgctggtattttgggcttacattttgcaagatttattatagttttgacctgatgcttagcataacatccatttttcatctttgctcagtggccattgatagattttatgctatatgttacccattactttattccaccaaaataactattccagtcattaaaagattgctacttctatgttggtcggtccctggagcatttgccttcggggtggtcttctcagaggcctatgcagatggaatagagggctatgacatcttggttgcttgttccagttcctgcccagtgatgttcaacaagctatgggggaccaccttgtttatggcaggtttcttcactcctgggtctatgatggtggggatttatggcaaaatttttgcagtatccagaaaacatgctcatgccatcaataacttgcgagaaaatcaaaataatcaagtgaagaaagacaaaaaagctgccaaaactttaggaatagtgataggagttttcttattatgttggtttccttgtttcttcacaattttattggatccctttttgaacttctctactcctgtagttttgtttgatgccttgacatggtttggctattttaactccacatgtaatccgttaatatatggtttcttctatccctggtttcgcagagcactgaagtacattttgctaggtaaaattttcagctcatgtttccataatactattttgtgtatgcaaaaagaaagtgaggctagcaaaggagaagaactcttcactggagttgtcccaattcttgttgaattagatggtgatgttaacggccacaagttctctgtcagtggagagggtgaaggtgatgcaacatacggaaaacttaccctgaagttcatctgcactactggcaaactgcctgttccatggccaacactagtcactactctgtgctatggtgttcaatgcttttcaagatacccggatcatatgaaacggcatgactttttcaagagtgccatgcccgaaggttatgtacaggaaaggaccatcttcttcaaagatgacggcaactacaagacacgtgctgaagtcaagtttgaaggtgatacccttgttaatagaatcgagttaaaaggtattgacttcaaggaagatggcaacattctgggacacaaattggaatacaactataactcacacaatgtatacatcatggcagacaaacaaaagaatggaatcaaagtgaacttcaagacccgccacaacattgaagatggaagcgttcaactagcagaccattatcaacaaaatactccaattggcgatggccctgtccttttaccagacaaccattacctgtccacacaatctgccctttcgaaagatcccaacgaaaagagagaccacatggtccttcttgagtttgtaacagctgctgggattacacatggcatggatgaactgtacaactga

SEQ ID NO: 133 - DNA, 1839 bp, Human
atgcccacactcaatacttctgcctctccacccacattcttctgggccaatgcctccggaggcagtgtgctgagtgctgatgatgctccgatgcctgtcaaattcctagccctgaggctcatggttgccctggcctatgggcttgtgggggccattggcttgctgggaaatttggcggtgctgtgggtactgagtaactgtgcccggagagcccctggcccaccttcagacaccttcgtcttcaacctggctctggcggacctgggactggcactcactctccccttttgggcagccgagtcggcactggactttcactggcccttcggaggtgccctctgcaagatggttctgacggccactgtcctcaacgtctatgccagcatcttcctcatcacagcgctgagcgttgctcgctactgggtggtggccatggctgcggggccaggcacccacctctcactcttctgggcccgaatagccaccctggcagtgtgggcggcggctgccctggtgacggtgcccacagctgtcttcggggtggagggtgaggtgtgtggtgtgcgcctttgcctgctgcgtttccccagcaggtactggctgggggcctaccagctgcagagggtggtgctggctttcatggtgcccttgggcgtcatcaccaccagctacctgctgctgctggccttcctgcagcggcggcaacggcggcggcaggacagcagggtcgtggcccgctctgtccgcatcctggtggcttccttcttcctctgctggtttcccaaccatgtggtcactctctggggtgtcctggtgaagtttgacctggtgccctggaacagtactttctatactatccagacgtatgtcttccctgtcactacttgcttggcacacagcaatagctgcctcaaccctgtgctgtactgtctcctgaggcgggagccccggcaggctctggcaggcaccttcagggatctgcggtcgaggctgtggccccagggcggaggctgggtgcaacaggtggccctaaagcaggtaggcaggcggtgggtcgcaagcaacccccgggagagccgcccttctaccctgctcaccaacctggacagagggacacccggggctagcaaaggagaagaactcttcactggagttgtcccaattcttgttgaattagatggtgatgttaacggccacaagttctctgtcagtggagagggtgaaggtgatgcaacatacggaaaacttaccctgaagttcatctgcactactggcaaactgcctgttccatggccaacactagtcactactctgtgctatggtgttcaatgcttttcaagatacccggatcatatgaaacggcatgactttttcaagagtgccatgcccgaaggttatgtacaggaaaggaccatcttcttcaaagatgacggcaactacaagacacgtgctgaagtcaagtttgaaggtgatacccttgttaatagaatcgagttaaaaggtattgacttcaaggaagatggcaacattctgggacacaaattggaatacaactataactcacacaatgtatacatcatggcagacaaacaaaagaatggaatcaaagtgaacttcaagacccgccacaacattgaagatggaagcgttcaactagcagaccattatcaacaaaatactccaattggcgatggccctgtccttttaccagacaaccattacctgtccacacaatctgccctttcgaaagatcccaacgaaaagagagaccacatggtccttcttgagtttgtaacagctgctgggattacacatggcatggatgaactgtacaactga

SEQ ID NO: 134 - DNA, 1800 bp, Human
atgtcccctgaatgcgcgcgggcagcgggcgacgcgcccttgcgcagcctggagcaagccaaccgcacccgctttcccttcttctccgacgtcaagggcgaccaccggctggtgctggccgcggtggagacaaccgtgctggtgctcatctttgcagtgtcgctgctgggcaacgtgtgcgccctggtgctggtggcgcgccgacgacgccgcggcgcgactgcctgcctggtactcaacctcttctgcgcggacctgctcttcatcagcgctatccctctggtgctggccgtgcgctggactgaggcctggctgctgggccccgttgcctgccacctgctcttctacgtgatgaccctgagcggcagcgtcaccatcctcacgctggccgcggtcagcctggagcgcatggtgtgcatcgtgcacctgcagcgcggcgtgcggggtcctgggcggcgggcgcgggcagtgctgctggcgctcatctggggctattcggcggtcgccgctctgcctctctgcgtcttcttccgagtcgtcccgcaacggctccccggcgccgaccaggaaatttcgatttgcacactgatttggcccaccattcctggagagatctcgtgggatgtctcttttgttactttgaacttcttggtgccaggactggtcattgtgatcagttactccaaaattttacagatcacaaaggcatcaaggaagaggctcacggtaagcctggcctactcggagagccaccagatccgcgtgtcccagcaggacttccggctcttccgcaccctcttcctcctcatggtctccttcttcatcatgtggagccccatcatcatcaccatcctcctcatcctgatccagaacttcaagcaagacctggtcatctggccgtccctcttcttctgggtggtggccttcacatttgctaattcagccctaaaccccatcctctacaacatgacactgtgcaggaatgagtggaagaaaattttttgctgcttctggttcccagaaaagggagccattttaacagacacatctgtcaaaagaaatgacttgtcgattatttctggcgctagcaaaggagaagaactcttcactggagttgtcccaattcttgttgaattagatggtgatgttaacggccacaagttctctgtcagtggagagggtgaaggtgatgcaacatacggaaaacttaccctgaagttcatctgcactactggcaaactgcctgttccatggccaacactagtcactactctgtgctatggtgttcaatgcttttcaagatacccggatcatatgaaacggcatgactttttcaagagtgccatgcccgaaggttatgtacaggaaaggaccatcttcttcaaagatgacggcaactacaagacacgtgctgaagtcaagtttgaaggtgatacccttgttaatagaatcgagttaaaaggtattgacttcaaggaagatggcaacattctgggacacaaattggaatacaactataactcacacaatgtatacatcatggcagacaaacaaaagaatggaatcaaagtgaacttcaagacccgccacaacattgaagatggaagcgttcaactagcagaccattatcaacaaaatactccaattggcgatggccctgtccttttaccagacaaccattacctgtccacacaatctgccctttcgaaagatcccaacgaaaagagagaccacatggtccttcttgagtttgtaacagctgctgggattacacatggcatggatgaactgtacaactga

SEQ ID NO: 135 - DNA, 2673 bp, Human
atgcagggaccattgcttcttccaggcctctgctttctgctgagcctctttggagctgtgactcagaaaaccaaaacttcctgtgctaagtgccccccaaatgcttcctgtgtcaataacactcactgcacctgcaaccatggatatacttctggatctgggcagaaactattcacattccccttggagacatgtaacgacattaatgaatgcacaccaccctatagtgtatattgtggatttaacgctgtgtgttacaatgtcgaaggaagtttctactgtcaatgtgtcccaggatatagactgcattctgggaatgaacaattcagtaattccaatgagaacacctgtcaggacaccacctcctcaaagacaacccagggcaggaaagagctgcaaaagattgtggacaaatttgagtcacttctcaccaatcagactttatggagaacagaagggagacaagaaatctcatccacagctaccactattctccgggatgtggaatcgaaagttctagaaactgccttgaaagatccagaacaaaaagtcctgaaaatccaaaacgatagtgtagctattgaaactcaagcgattacagacaattgctctgaagaaagaaagacattcaacttgaacgtccaaatgaactcaatggacatccgttgcagtgacatcatccagggagacacacaaggtcccagtgccattgcctttatctcatattcttctcttggaaacatcataaatgcaactttttttgaagagatggataagaaagatcaagtgtatctgaactctcaggttgtgagtgctgctattggacccaaaaggaacgtgtctctctccaagtctgtgacgctgactttccagcacgtgaagatgacccccagtaccaaaaaggtcttctgtgtctactggaagagcacagggcagggcagccagtggtccagggatggctgcttcctgatacacgtgaacaagagtcacaccatgtgtaattgcagtcacctgtccagcttcgctgtcctgatggccctgaccagccaggaggaggatcccgtgctgactgtcatcacctacgtggggctgagcgtctctctgctgtgcctcctcctggcggccctcacttttctcctgtgtaaagccatccagaacaccagcacctcactgcatctgcagctctcgctctgcctcttcctggcccacctcctcttcctcgtggggattgatcgaactgaacccaaggtgctgtgctccatcatcgccggtgctttgcactatctctacctggccgccttcacctggatgctgctggagggtgtgcacctcttcctcactgcacggaacctgacagtggtcaactactcaagcatcaatagactcatgaagtggatcatgttcccagtcggctatggcgttcccgctgtgactgtggccatttctgcagcctcctggcctcacctttatggaactgctgatcgatgctggctccacctggaccagggattcatgtggagtttccttggcccagtctgtgccattttctctgcgaatttagtattgtttatcttggtcttttggattttgaaaagaaaactttcctccctcaatagtgaagtgtcaaccatccagaacacaaggatgctggctttcaaagcaacagctcagctcttcatcctgggctgcacatggtgtctgggcttgctacaggtgggtccagctgcccaggtcatggcctacctcttcaccatcatcaacagcctccaaggcttcttcatcttcttggtctactgcctcctcagccagcaggtccagaaacaatatcaaaagtggtttagagagatcgtaaaatcaaaatctgagtctgagacatacacactttccagcaagatgggtcctgactcaaaacccagtgagggggatgtttttccaggacaagtgaagagaaaatatgctagcaaaggagaagaactcttcactggagttgtcccaattcttgttgaattagatggtgatgttaacggccacaagttctctgtcagtggagagggtgaaggtgatgcaacatacggaaaacttaccctgaagttcatctgcactactggcaaactgcctgttccatggccaacactagtcactactctgtgctatggtgttcaatgcttttcaagatacccggatcatatgaaacggcatgactttttcaagagtgccatgcccgaaggttatgtacaggaaaggaccatcttcttcaaagatgacggcaactacaagacacgtgctgaagtcaagtttgaaggtgatacccttgttaatagaatcgagttaaaaggtattgacttcaaggaagatggcaacattctgggacacaaattggaatacaactataactcacacaatgtatacatcatggcagacaaacaaaagaatggaatcaaagtgaacttcaagacccgccacaacattgaagatggaagcgttcaactagcagaccattatcaacaaaatactccaattggcgatggccctgtccttttaccagacaaccattacctgtccacacaatctgccctttcgaaagatcccaacgaaaagagagaccacatggtccttcttgagtttgtaacagctgctgggattacacatggcatggatgaactgtacaactga

SEQ ID NO: 136 - DNA, 1797 bp, Human
atggacccagaagaaacttcagtttatttggattattactatgctacgagcccaaactctgacatcagggagacccactcccatgttccttacacctctgtcttccttccagtcttttacacagctgtgttcctgactggagtgctggggaaccttgttctcatgggagcgttgcatttcaaacccggcagccgaagactgatcgacatctttatcatcaatctggctgcctctgacttcatttttcttgtcacattgcctctctgggtggataaagaagcatctctaggactgtggaggacgggctccttcctgtgcaaagggagctcctacatgatctccgtcaatatgcactgcagtgtcctcctgctcacttgcatgagtgttgaccgctacctggccattgtgtggccagtcgtatccaggaaattcagaaggacagactgtgcatatgtagtctgtgccagcatctggtttatctcctgcctgctggggttgcctactcttctgtccagggagctcacgctgattgatgataagccatactgtgcagagaaaaaggcaactccaattaaactcatatggtccctggtggccttaattttcaccttttttgtccctttgttgagcattgtgacctgctactgttgcattgcaaggaagctgtgtgcccattaccagcaatcaggaaagcacaacaaaaagctgaagaaatctataaagatcatctttattgtcgtggcagcctttcttgtctcctggctgcccttcaatactttcaagttcctggccattgtctctgggttgcggcaagaacactatttaccctcagctattcttcagcttggtatggaggtgagtggacccttggcatttgccaacagctgtgtcaaccctttcatttactatatcttcgacagctacatccgccgggccattgtccactgcttgtgcccttgcctgaaaaactatgactttgggagtagcactgagacatcagatagtcacctcactaaggctctctccaccttcattcatgcagaagattttgccaggaggaggaagaggtctgtgtcactcgctagcaaaggagaagaactcttcactggagttgtcccaattcttgttgaattagatggtgatgttaacggccacaagttctctgtcagtggagagggtgaaggtgatgcaacatacggaaaacttaccctgaagttcatctgcactactggcaaactgcctgttccatggccaacactagtcactactctgtgctatggtgttcaatgcttttcaagatacccggatcatatgaaacggcatgactttttcaagagtgccatgcccgaaggttatgtacaggaaaggaccatcttcttcaaagatgacggcaactacaagacacgtgctgaagtcaagtttgaaggtgatacccttgttaatagaatcgagttaaaaggtattgacttcaaggaagatggcaacattctgggacacaaattggaatacaactataactcacacaatgtatacatcatggcagacaaacaaaagaatggaatcaaagtgaacttcaagacccgccacaacattgaagatggaagcgttcaactagcagaccattatcaacaaaatactccaattggcgatggccctgtccttttaccagacaaccattacctgtccacacaatctgccctttcgaaagatcccaacgaaaagagagaccacatggtccttcttgagtttgtaacagctgctgggattacacatggcatggatgaactgtacaactga

SEQ ID NO: 137 - DNA, 1674 bp, Human
atgccattcccaaactgctcagcccccagcactgtggtggccacagctgtgggtgtcttgctggggctggagtgtgggctgggtctgctgggcaacgcggtggcgctgtggaccttcctgttccgggtcagggtgtggaagccgtacgctgtctacctgctcaacctggccctggctgacctgctgttggctgcgtgcctgcctttcctggccgccttctacctgagcctccaggcttggcatctgggccgtgtgggctgctgggccctgcgcttcctgctggacctcagccgcagcgtggggatggccttcctggccgccgtggctttggaccggtacctccgtgtggtccaccctcggcttaaggtcaacctgctgtctcctcaggcggccctgggggtctcgggcctcgtctggctcctgatggtcgccctcacctgcccgggcttgctcatctctgaggccgcccagaactccaccaggtgccacagtttctactccagggcagacggctccttcagcatcatctggcaggaagcactctcctgccttcagtttgtcctcccctttggcctcatcgtgttctgcaatgcaggcatcatcagggctctccagaaaagactccgggagcctgagaaacagcccaagcttcagcgggcccaggcactggtcaccttggtggtggtgctgtttgctctgtgctttctgccctgcttcctggccagagtcctgatgcacatcttccagaatctggggagctgcagggccctttgtgcagtggctcatacctcggatgtcacgggcagcctcacctacctgcacagtgtgctcaaccccgtggtatactgcttctccagccccaccttcaggagctcctatcggagggtcttccacaccctccgaggcaaagggcaggcagcagagcccccagatttcaaccccagagactcctattccgctagcaaaggagaagaactcttcactggagttgtcccaattcttgttgaattagatggtgatgttaacggccacaagttctctgtcagtggagagggtgaaggtgatgcaacatacggaaaacttaccctgaagttcatctgcactactggcaaactgcctgttccatggccaacactagtcactactctgtgctatggtgttcaatgcttttcaagatacccggatcatatgaaacggcatgactttttcaagagtgccatgcccgaaggttatgtacaggaaaggaccatcttcttcaaagatgacggcaactacaagacacgtgctgaagtcaagtttgaaggtgatacccttgttaatagaatcgagttaaaaggtattgacttcaaggaagatggcaacattctgggacacaaattggaatacaactataactcacacaatgtatacatcatggcagacaaacaaaagaatggaatcaaagtgaacttcaagacccgccacaacattgaagatggaagcgttcaactagcagaccattatcaacaaaatactccaattggcgatggccctgtccttttaccagacaaccattacctgtccacacaatctgccctttcgaaagatcccaacgaaaagagagaccacatggtccttcttgagtttgtaacagctgctgggattacacatggcatggatgaactgtacaactga

SEQ ID NO: 138 - DNA, 1926 bp, Human
atgttcgtggcatcagagagaaagatgagagctcaccaggtgctcaccttcctcctgctcttcgtgatcacctcggtggcctctgaaaacgccagcacatcccgaggctgtgggctggacctcctccctcagtacgtgtccctgtgcgacctggacgccatctggggcattgtggtggaggcggtggccggggcgggcgccctgatcacactgctcctgatgctcatcctcctggtgcggctgcccttcatcaaggagaaggagaagaagagccctgtgggcctccactttctgttcctcctggggaccctgggcctctttgggctgacgtttgccttcatcatccaggaggacgagaccatctgctctgtccgccgcttcctctggggcgtcctctttgcgctctgcttctcctgcctgctgagccaggcatggcgcgtgcggaggctggtgcggcatggcacgggccccgcgggctggcagctggtgggcctggcgctgtgcctgatgctggtgcaagtcatcatcgctgtggagtggctggtgctcaccgtgctgcgtgacacaaggccagcctgcgcctacgagcccatggactttgtgatggccctcatctacgacatggtactgcttgtggtcaccctggggctggccctcttcactctgtgcggcaagttcaagaggtggaagctgaacggggccttcctcctcatcacagccttcctctctgtgctcatctgggtggcctggatgaccatgtacctcttcggcaatgtcaagctgcagcagggggatgcctggaacgaccccaccttggccatcacgctggcggccagcggctgggtcttcgtcatcttccacgccatccctgagatccactgcacccttctgccagccctgcaggagaacacgcccaactacttcgacacgtcgcagcccaggatgcgggagacggccttcgaggaggacgtgcagctgccgcgggcctatatggagaacaaggccttctccatggatgaacacaatgcagctctccgaacagcaggatttcccaacggcagcttgggaaaaagacccagtggcagcttggggaaaagacccagcgctccgtttagaagcaacgtgtatcagccaactgagatggccgtcgtgctcaacggtgggaccatcccaactgctccgccaagtcacacaggaagacacctttgggctagcaaaggagaagaactcttcactggagttgtcccaattcttgttgaattagatggtgatgttaacggccacaagttctctgtcagtggagagggtgaaggtgatgcaacatacggaaaacttaccctgaagttcatctgcactactggcaaactgcctgttccatggccaacactagtcactactctgtgctatggtgttcaatgcttttcaagatacccggatcatatgaaacggcatgactttttcaagagtgccatgcccgaaggttatgtacaggaaaggaccatcttcttcaaagatgacggcaactacaagacacgtgctgaagtcaagtttgaaggtgatacccttgttaatagaatcgagttaaaaggtattgacttcaaggaagatggcaacattctgggacacaaattggaatacaactataactcacacaatgtatacatcatggcagacaaacaaaagaatggaatcaaagtgaacttcaagacccgccacaacattgaagatggaagcgttcaactagcagaccattatcaacaaaatactccaattggcgatggccctgtccttttaccagacaaccattacctgtccacacaatctgccctttcgaaagatcccaacgaaaagagagaccacatggtccttcttgagtttgtaacagctgctgggattacacatggcatggatgaactgtacaactga

SEQ ID NO: 139 - DNA, 1746 bp, Human
atggctggaaactgctcctgggaggcccatcccggcaacaggaacaggatgtgccctggcctgagcgaggccccggaactctacagccggggcttcctgaccatcgagcagatcgcgatgctgccgcctccggccgtcatgaactacatcttcctgctcctctgcctgtgtggcctggtgggcaacgggctggtcctctggtttttcggcttctccatcaagaggaaccccttctccatctacttcctgcacctggccagcgccgatgtgggctacctcttcagcaaggcggtgttctccatcctgaacacggggggcttcctgggcacgtttgccgactacatccgcagcgtgtgccgggtcctggggctctgcatgttccttaccggcgtgagcctcctgccggccgtcagcgccgagcgctgcgcctcggtcatcttccccgcctggtactggcgccggcggcccaagcgcctgtcggccgtggtgtgcgccctgctgtgggtcctgtccctcctggtcacctgcctgcacaactacttctgcgtgttcctgggccgcggggcccccggcgcggcctgcaggcacatggacatcttcctgggcatcctcctgttcctgctctgctgcccgctcatggtgctgccctgcctggccctcatcctgcacgtggagtgccgggcccgacggcgccagcgctctgccaagctcaaccacgtcatcctggccatggtctccgtcttcctggtgtcctccatctacttagggatcgactggttcctcttctgggtcttccagatcccggcccccttccccgagtacgtcactgacctgtgcatctgcatcaacagcagcgccaagcccatcgtctacttcctggccgggagggacaagtcgcagcggctgtgggagccgctcagggtggtcttccagcgggccctgcgggacggcgctgagctgggggaggccgggggcagcacgcccaacacagtcaccatggagatgcagtgtcccccggggaacgcctccgctagcaaaggagaagaactcttcactggagttgtcccaattcttgttgaattagatggtgatgttaacggccacaagttctctgtcagtggagagggtgaaggtgatgcaacatacggaaaacttaccctgaagttcatctgcactactggcaaactgcctgttccatggccaacactagtcactactctgtgctatggtgttcaatgcttttcaagatacccggatcatatgaaacggcatgactttttcaagagtgccatgcccgaaggttatgtacaggaaaggaccatcttcttcaaagatgacggcaactacaagacacgtgctgaagtcaagtttgaaggtgatacccttgttaatagaatcgagttaaaaggtattgacttcaaggaagatggcaacattctgggacacaaattggaatacaactataactcacacaatgtatacatcatggcagacaaacaaaagaatggaatcaaagtgaacttcaagacccgccacaacattgaagatggaagcgttcaactagcagaccattatcaacaaaatactccaattggcgatggccctgtccttttaccagacaaccattacctgtccacacaatctgccctttcgaaagatcccaacgaaaagagagaccacatggtccttcttgagtttgtaacagctgctgggattacacatggcatggatgaactgtacaactga

SEQ ID NO: 140 - DNA, 3759 bp, Human
atggttttctctgtcaggcagtgtggccatgttggcagaactgaagaagttttactgacgttcaagatattccttgtcatcatttgtcttcatgtcgttctggtaacatccctggaagaagatactgataattccagtttgtcaccaccacctgctaaattatctgttgtcagttttgccccctcctccaatgaggttgaaacaacaagcctcaatgatgttactttaagcttactcccttcaaacgaaacagaaaaaactaaaatcactatagtaaaaaccttcaatgcatcaggcgtcaaaccccagagaaatatctgcaatttgtcatctatttgcaatgactcagcattttttagaggtgagatcatgtttcaatatgataaagaaagcactgttccccagaatcaacatataacgaatggcaccttaactggagtcctgtctctaagtgaattaaaacgctcagagctcaacaaaaccctgcaaaccctaagtgagacttactttataatgtgtgctacagcagaggcccaaagcacattaaattgtacattcacaataaaactgaataatacaatgaatgcatgtgctgtaatagctgctttggaaagagtaaagattcgaccaatggaacactgctgctgttctgtcaggataccctgcccttcctccccagaagagttggaaaagcttcagtgtgacctgcaggatcccattgtctgtcttgctgaccatccacgtggcccaccattttcttccagccaatccatcccagtggtgcctcgggccactgtgctttcccaggtccccaaagctacctcttttgctgagcctccagattattcacctgtgacccacaatgttccctctccaataggggagattcaacccctttcaccccagccttcagctcccatagcttccagccctgccattgacatgcccccacagtctgaaacgatctcttcccctatgccccaaacccatgtctccggcaccccacctcctgtgaaagcctcattttcctctcccaccgtgtctgcccctgcgaatgtcaacactaccagcgcacctcctgtccagacagacatcgtcaacaccagcagtatttctgatcttgagaaccaagtgttgcagatggagaaggctctgtccttgggcagcctggagcctaacctcgcaggagaaatgatcaaccaagtcagcagactccttcattccccgcctgacatgctggcccctctggctcaaagattgctgaaagtagtggatgacattggcctacagctgaacttttcaaacacgactataagtctaacctccccttctttggctctggctgtgatcagagtgaatgccagtagtttcaacacaactacctttgtggcccaagaccctgcaaatcttcaggtttctctggaaacccaagctcctgagaacagtattggcacaattactcttccttcatcgctgatgaataatttaccagctcatgacatggagctagcttccagggttcagttcaatttttttgaaacacctgctttgtttcaggatccttccctggagaacctctctctgatcagctacgtcatatcatcgagtgttgcaaacctgaccgtcaggaacttgacaagaaacgtgacagtcacattaaagcacatcaacccgagccaggatgagttaacagtgagatgtgtattttgggacttgggcagaaatggtggcagaggaggctggtcagacaatggctgctctgtcaaagacaggagattgaatgaaaccatctgtacctgtagccatctaacaagcttcggcgttctgctggacctatctaggacatctgtgctgcctgctcaaatgatggctctgacgttcattacatatattggttgtgggctttcatcaatttttctgtcagtgactcttgtaacctacatagcttttgaaaagatccggagggattacccttccaaaatcctcatccagctgtgtgctgctctgcttctgctgaacctggtcttcctcctggactcgtggattgctctgtataagatgcaaggcctctgcatctcagtggctgtatttcttcattattttctcttggtctcattcacatggatgggcctagaagcattccatatgtacctggcccttgtcaaagtatttaatacttacatccgaaaatacatccttaaattctgcattgtcggttggggggtaccagctgtggttgtgaccatcatcctgactatatccccagataactatgggcttggatcctatgggaaattccccaatggttcaccggatgacttctgctggatcaacaacaatgcagtattctacattacggtggtgggatatttctgtgtgatatttttgctgaacgtcagcatgttcattgtggtcctggttcagctctgtcgaattaaaaagaagaagcaactgggagcccagcgaaaaaccagtattcaagacctcaggagtatcgctggccttacatttttactgggaataacttggggctttgccttctttgcctggggaccagttaacgtgaccttcatgtatctgtttgccatctttaataccttacaaggatttttcatattcatcttttactgtgtggccaaagaaaatgtcaggaagcaatggaggcggtatctttgttgtggaaagttacggctggctgaaaattctgactggagtaaaactgctactaatggtttaaagaagcagactgtaaaccaaggagtgtccagctcttcaaattccttacagtcaagcagtaactccactaactccaccacactgctagtgaataatgattgctcagtacacgcaagcgggaatggaaatgcttctacagagaggaatggggtctcttttagtgttcagaatggagatgtgtgccttcacgatttcactggaaaacagcacatgtttaacgagaaggaagattcctgcaatgggaaaggccgtatggctctcagaaggacttcaaagcggggaagcttacactttattgagcaaatgtctagcaaaggagaagaactcttcactggagttgtcccaattcttgttgaattagatggtgatgttaacggccacaagttctctgtcagtggagagggtgaaggtgatgcaacatacggaaaacttaccctgaagttcatctgcactactggcaaactgcctgttccatggccaacactagtcactactctgtgctatggtgttcaatgcttttcaagatacccggatcatatgaaacggcatgactttttcaagagtgccatgcccgaaggttatgtacaggaaaggaccatcttcttcaaagatgacggcaactacaagacacgtgctgaagtcaagtttgaaggtgatacccttgttaatagaatcgagttaaaaggtattgacttcaaggaagatggcaacattctgggacacaaattggaatacaactataactcacacaatgtatacatcatggcagacaaacaaaagaatggaatcaaagtgaacttcaagacccgccacaacattgaagatggaagcgttcaactagcagaccattatcaacaaaatactccaattggcgatggccctgtccttttaccagacaaccattacctgtccacacaatctgccctttcgaaagatcccaacgaaaagagagaccacatggtccttcttgagtttgtaacagctgctgggattacacatggcatggatgaactgtacaactga

SEQ ID NO: 141 - DNA, 1968 bp, Human
atggagtcctcacccatcccccagtcatcagggaactcttccactttggggagggtccctcaaaccccaggtccctctactgccagtggggtcccggaggtggggctacgggatgttgcttcggaatctgtggccctcttcttcatgctcctgctggacttgactgctgtggctggcaatgccgctgtgatggccgtgatcgccaagacgcctgccctccgaaaatttgtcttcgtcttccacctctgcctggtggacctgctggctgccctgaccctcatgcccctggccatgctctccagctctgccctctttgaccacgccctctttggggaggtggcctgccgcctctacttgtttctgagcgtgtgctttgtcagcctggccatcctctcggtgtcagccatcaatgtggagcgctactattacgtagtccaccccatgcgctacgaggtgcgcatgacgctggggctggtggcctctgtgctggtgggtgtgtgggtgaaggccttggccatggcttctgtgccagtgttgggaagggtctcctgggaggaaggagctcccagtgtccccccaggctgttcactccagtggagccacagtgcctactgccagctttttgtggtggtctttgctgtcctttactttctgttgcccctgctcctcatacttgtggtctactgcagcatgttccgagtggcccgcgtggctgccatgcagcacgggccgctgcccacgtggatggagacaccccggcaacgctccgaatctctcagcagccgctccacgatggtcaccagctcgggggccccccagaccaccccacaccggacgtttgggggagggaaagcagcagtggttctcctggctgtggggggacagttcctgctctgttggttgccctacttctctttccacctctatgttgccctgagtgctcagcccatttcaactgggcaggtggagagtgtggtcacctggattggctacttttgcttcacttccaaccctttcttctatggatgtctcaaccggcagatccggggggagctcagcaagcagtttgtctgcttcttcaagccagctccagaggaggagctgaggctgcctagccgggagggctccattgaggagaacttcctgcagttccttcaggggactggctgtccttctgagtcctgggtttcccgacccctacccagccccaagcaggagccacctgctgttgactttcgaatccaggccagagctagcaaaggagaagaactcttcactggagttgtcccaattcttgttgaattagatggtgatgttaacggccacaagttctctgtcagtggagagggtgaaggtgatgcaacatacggaaaacttaccctgaagttcatctgcactactggcaaactgcctgttccatggccaacactagtcactactctgtgctatggtgttcaatgcttttcaagatacccggatcatatgaaacggcatgactttttcaagagtgccatgcccgaaggttatgtacaggaaaggaccatcttcttcaaagatgacggcaactacaagacacgtgctgaagtcaagtttgaaggtgatacccttgttaatagaatcgagttaaaaggtattgacttcaaggaagatggcaacattctgggacacaaattggaatacaactataactcacacaatgtatacatcatggcagacaaacaaaagaatggaatcaaagtgaacttcaagacccgccacaacattgaagatggaagcgttcaactagcagaccattatcaacaaaatactccaattggcgatggccctgtccttttaccagacaaccattacctgtccacacaatctgccctttcgaaagatcccaacgaaaagagagaccacatggtccttcttgagtttgtaacagctgctgggattacacatggcatggatgaactgtacaactga

SEQ ID NO: 142 - DNA, 1722 bp, Human
atgcagccgtccccgccgcccaccgagctggtgccgtcggagcgcgccgtggtgctgctgtcgtgcgcactctccgcgctcggctcgggcctgctggtggccacgcacgccctgtggcccgacctgcgcagccgggcacggcgcctgctgctcttcctgtcgctggccgacctgctctcggccgcctcctacttctacggagtgctgcagaacttcgcgggcccgtcgtgggactgcgtgctgcagggcgcgctgtccaccttcgccaacaccagctccttcttctggaccgtggccattgcgctctacttgtacctcagcatcgtccgcgccgcgcgcgggcctcgcacagatcgcctgctttgggccttccatgtcgtcagctggggggtcccgttggtcatcactgtggcagccgtcgccctgaagaagattggctatgacgcctcggacgtgtctgtgggctggtgctggatcgacctggaggccaaggaccatgtcctgtggatgctgctgacggggaagctgtgggagatgctggcatatgtgctgctgcctctgctgtacctcctggtccggaagcacatcaacagagcgcacacggcactctctgagtaccggcccatcctctcccaggagcaccgcctgctgcgccactcctccatggcggacaagaagctggtgctcatcccgctcatcttcatcggcctcagggtctggagcaccgtgcggttcgtgctgaccctctgtggctccccggccgtgcagacgccggtgctggtggttctgcatggtatcgggaacacgtttcagggaggtgccaactgcatcatgttcgtcctctgcacccgcgccgtccgaactcggctcttctctctctgttgctgctgctgctcttctcagcctcccaccaagagcccggctggcactcccaaggctcccgcgccttccaagccaggagaatctcaggaatcccaagggaccccaggggaacttccaagcactgctagcaaaggagaagaactcttcactggagttgtcccaattcttgttgaattagatggtgatgttaacggccacaagttctctgtcagtggagagggtgaaggtgatgcaacatacggaaaacttaccctgaagttcatctgcactactggcaaactgcctgttccatggccaacactagtcactactctgtgctatggtgttcaatgcttttcaagatacccggatcatatgaaacggcatgactttttcaagagtgccatgcccgaaggttatgtacaggaaaggaccatcttcttcaaagatgacggcaactacaagacacgtgctgaagtcaagtttgaaggtgatacccttgttaatagaatcgagttaaaaggtattgacttcaaggaagatggcaacattctgggacacaaattggaatacaactataactcacacaatgtatacatcatggcagacaaacaaaagaatggaatcaaagtgaacttcaagacccgccacaacattgaagatggaagcgttcaactagcagaccattatcaacaaaatactccaattggcgatggccctgtccttttaccagacaaccattacctgtccacacaatctgccctttcgaaagatcccaacgaaaagagagaccacatggtccttcttgagtttgtaacagctgctgggattacacatggcatggatgaactgtacaactga

SEQ ID NO: 143 - DNA, 2763 bp, Human
atggcagtccggttgtgcagtctctctctatatggagagatagaattacaaaaagtgacaataggaaattgcaatgaaaatctggaaaccctggaaaagcaggtaaaggatgtcacagcaccacttaataacatttcttctgaagtccagattttaacatctgatgccaataaattaactgctgagaacatcactagtgctacgcgagtggttggacagatattcaacacttccagaaatgcttcacctgaggcaaagaaagttgccatagtaacagtgagtcaactcctagatgccagtgaagatgcttttcaaagagttgctgctactgctaatgatgatgcccttacaacgcttattgagcaaatggagacttattccttgtctttgggtaatcaatcagtggtggaacctaacatagcaatacagtcagcaaatttctcttcagaaaatgcggtggggccttcaaatgttcgcttctctgtgcagaaaggagctagcagttctctagtttctagttcaacatttatacatacaaatgtggatggccttaacccagatgcacagactgagcttcaggtcttgcttaatatgacgaaaaattacaccaagacatgcggctttgtagtttatcaaaatgacaagcttttccaatcaaaaacttttacagctaaatcggattttagtcaaaaaattatctcaagcaaaactgatgaaaatgagcaagatcagagtgcttctgttgacatggtctttagtccaaagtacaaccaaaaagaatttcaactctattcctatgcctgtgtctattggaatttgtcagcgaaggactgggacacatatggctgtcaaaaagacaagggcactgatggattcctgcgctgccgctgcaaccatactactaattttgctgtattaatgactttcaaaaaggattatcaatatcccaaatcacttgacatattatccaacgttggatgtgcactgtctgttactggtctggctctcacagttatatttcagattgtcaccaggaaagtcagaaaaacctcagtaacctgggttttggtcaatctgtgcatatcaatgttgattttcaacctcctctttgtgtttggaattgaaaactccaataagaacttgcagacaagtgatggtgacatcaataatattgactttgacaataatgacatacccaggacagacaccattaacatcccgaatcccatgtgcactgcgattgccgccttactgcactattttctgttagtgacatttacctggaacgcactcagcgctgcacagctctattaccttctaataaggaccatgaagcctcttcctcggcatttcattcttttcatctcattaattggatggggagtcccagctatagtagtggctataacagtgggagttatttattctcagaatggaaataatccacagtgggaattagactaccggcaagagaaaatctgctggctggcaattccagaacccaatggtgttataaaaagtccgctgttgtggtcattcatcgtacctgtaaccattatcctcatcagcaatgttgttatgtttattacaatctcgatcaaagtgctgtggaagaataaccagaacctgacaagcacaaaaaaagtttcatccatgaagaagattgttagcacattatctgttgcagttgtttttggaattacctggattctagcatacctgatgctagttaatgatgatagcatcaggatcgtcttcagctacatattctgccttttcaacactacacagggattgcaaatttttatcctgtacactgttagaacaaaagtcttccagagtgaagcttccaaagtgttgatgttgctatcgtctattgggagaaggaagtcattgccttcagtgacgcggccgaggctgcgtgtaaagatgtataatttcctcaggtcattgccaaccttacatgaacgctttaggctactggaaacctctccgagtactgaggaaatcacactctctgaaagtgacaatgcaaaggaaagcatcgctagcaaaggagaagaactcttcactggagttgtcccaattcttgttgaattagatggtgatgttaacggccacaagttctctgtcagtggagagggtgaaggtgatgcaacatacggaaaacttaccctgaagttcatctgcactactggcaaactgcctgttccatggccaacactagtcactactctgtgctatggtgttcaatgcttttcaagatacccggatcatatgaaacggcatgactttttcaagagtgccatgcccgaaggttatgtacaggaaaggaccatcttcttcaaagatgacggcaactacaagacacgtgctgaagtcaagtttgaaggtgatacccttgttaatagaatcgagttaaaaggtattgacttcaaggaagatggcaacattctgggacacaaattggaatacaactataactcacacaatgtatacatcatggcagacaaacaaaagaatggaatcaaagtgaacttcaagacccgccacaacattgaagatggaagcgttcaactagcagaccattatcaacaaaatactccaattggcgatggccctgtccttttaccagacaaccattacctgtccacacaatctgccctttcgaaagatcccaacgaaaagagagaccacatggtccttcttgagtttgtaacagctgctgggattacacatggcatggatgaactgtacaactga

SEQ ID NO: 144 - DNA, 2301 bp, Human
atggatcactgtggtgcccttttcctgtgcctgtgccttctgactttgcagaatgcaacaacagagacatgggaagaactcctgagctacatggagaatatgcaggtgtccaggggccggagctcagttttttcctctcgtcaactccaccagctggagcagatgctactgaacaccagcttcccaggctacaacctgaccttgcagacacccaccatccagtctctggccttcaagctgagctgtgacttctctggcctctcgctgaccagtgccactctgaagcgggtgccccaggcaggaggtcagcatgcccggggtcagcacgccatgcagttccccgccgagctgacccgggacgcctgcaagacccgccccagggagctgcggctcatctgtatctacttctccaacacccactttttcaaggatgaaaacaactcatctctgctgaataactacgtcctgggggcccagctgagtcatgggcacgtgaacaacctcagggatcctgtgaacatcagcttctggcacaaccaaagcctggaaggctacaccctgacctgtgtcttctggaaggagggagccaggaaacagccctgggggggctggagccctgagggctgtcgtacagagcagccctcccactctcaggtgctctgccgctgcaaccacctcacctactttgctgttctcatgcaactctccccagccctggtccctgcagagttgctggcacctcttacgtacatctccctcgtgggctgcagcatctccatcgtggcctcgctgatcacagtcctgctgcacttccatttcaggaagcagagtgactccttaacacgcatccacatgaacctgcatgcctccgtgctgctcctgaacatcgccttcctgctgagccccgcattcgcaatgtctcctgtgcccgggtcagcatgcacggctctggccgctgccctgcactacgcgctgctcagctgcctcacctggatggccatcgagggcttcaacctctacctcctcctcgggcgtgtctacaacatctacatccgcagatatgtgttcaagcttggtgtgctaggctggggggccccagccctcctggtgctgctttccctctctgtcaagagctcggtatacggaccctgcacaatccccgtcttcgacagctgggagaatggcacaggcttccagaacatgtccatatgctgggtgcggagccccgtggtgcacagtgtcctggtcatgggctacggcggcctcacgtccctcttcaacctggtggtgctggcctgggcgctgtggaccctgcgcaggctgcgggagcgggcggatgcaccaagtgtcagggcctgccatgacactgtcactgtgctgggcctcaccgtgctgctgggaaccacctgggccttggccttcttttcttttggcgtcttcctgctgccccagctgttcctcttcaccatcttaaactcgctctacggtttcttccttttcctgtggttctgctcccagcggtgccgctcagaagcagaggccaaggcacagatagaggccttcagctcctcccaaacaacacaggctagcaaaggagaagaactcttcactggagttgtcccaattcttgttgaattagatggtgatgttaacggccacaagttctctgtcagtggagagggtgaaggtgatgcaacatacggaaaacttaccctgaagttcatctgcactactggcaaactgcctgttccatggccaacactagtcactactctgtgctatggtgttcaatgcttttcaagatacccggatcatatgaaacggcatgactttttcaagagtgccatgcccgaaggttatgtacaggaaaggaccatcttcttcaaagatgacggcaactacaagacacgtgctgaagtcaagtttgaaggtgatacccttgttaatagaatcgagttaaaaggtattgacttcaaggaagatggcaacattctgggacacaaattggaatacaactataactcacacaatgtatacatcatggcagacaaacaaaagaatggaatcaaagtgaacttcaagacccgccacaacattgaagatggaagcgttcaactagcagaccattatcaacaaaatactccaattggcgatggccctgtccttttaccagacaaccattacctgtccacacaatctgccctttcgaaagatcccaacgaaaagagagaccacatggtccttcttgagtttgtaacagctgctgggattacacatggcatggatgaactgtacaactga

SEQ ID NO: 145 - DNA, 3375 bp, Human
atgcgtggcttcaacctgctcctcttctggggatgttgtgttatgcacagctgggaagggcacataagacccacacggaaaccaaacacaaagggtaataactgtagagacagtaccttgtgcccagcttatgccacctgcaccaatacagtggacagttactattgcacttgcaaacaaggcttcctgtccagcaatgggcaaaatcacttcaaggatccaggagtgcgatgcaaagatattgatgaatgttctcaaagcccccagccctgtggtcctaactcatcctgcaaaaacctgtcagggaggtacaagtgcagctgtttagatggtttctcttctcccactggaaatgactgggtcccaggaaagccgggcaatttctcctgtactgatatcaatgagtgcctcaccagcagggtctgccctgagcattctgactgtgtcaactccatgggaagctacagttgcagctgtcaagttggattcatctctagaaactccacctgtgaagacgtgaatgaatgtgcagatccaagagcttgcccagagcatgcaacttgtaataacactgttggaaactactcttgtttctgcaacccaggatttgaatccagcagtggccacttgagtttccagggtctcaaagcatcgtgtgaagatattgatgaatgcactgaaatgtgccccatcaattcaacatgcaccaacactcctgggagctacttttgcacctgccaccctggctttgcaccaagcagtggacagttgaatttcacagaccaaggagtggaatgtagagatattgatgagtgccgccaagatccatcaacctgtggtcctaattctatctgcaccaatgccctgggctcctacagctgtggctgcattgtaggctttcatcccaatccagaaggctcccagaaagatggcaacttcagctgccaaagggttctcttcaaatgtaaggaagatgtgatacccgataataagcagatccagcaatgccaagagggaaccgcagtgaaacctgcatatgtctccttttgtgcacaaataaataacatcttcagcgttctggacaaagtgtgtgaaaataaaacgaccgtagtttctctgaagaatacaactgagagctttgtccctgtgcttaaacaaatatccacgtggactaaattcaccaaggaagagacgtcctccctggccacagtcttcctggagagtgtggaaagcatgacactggcatctttttggaaaccctcagcaaatgtcactccggctgttcggacggaatacttagacattgagagcaaagttatcaacaaagaatgcagtgaagagaatgtgacgttggacttggtagccaagggggataagatgaagatcgggtgttccacaattgaggaatctgaatccacagagaccactggtgtggcttttgtctcctttgtgggcatggaatcggttttaaatgagcgcttcttccaagaccaccaggctcccttgaccacctctgagatcaagctgaagatgaattctcgagtcgttgggggcataatgactggagagaagaaagacggcttctcagatccaatcatctacactctggagaacgttcagccaaagcagaagtttgagaggcccatctgtgtttcctggagcactgatgtgaagggtggaagatggacatcctttggctgtgtgatcctggaagcttctgagacatataccatctgcagctgtaatcagatggcaaatcttgccgttatcatggcgtctggggagctcacgatggacttttccttgtacatcattagccatgtaggcattatcatctccttggtgtgcctcgtcttggccatcgccacctttctgctgtgtcgctccatccgaaatcacaacacctacctccacctgcacctctgcgtgtgtctcctcttggcgaagactctcttcctcgccggtatacacaagactgacaacaagacgggctgcgccatcatcgcgggcttcctgcactaccttttccttgcctgcttcttctggatgctggtggaggctgtgatactgttcttgatggtcagaaacctgaaggtggtgaattacttcagctctcgcaacatcaagatgctgcacatctgtgcctttggttatgggctgccgatgctggtggtggtgatctctgccagtgtgcagccacagggctatggaatgcataatcgctgctggctgaatacagagacagggttcatctggagtttcttggggccagtttgcacagttatagtgatcaactcccttctcctgacctggaccttgtggatcctgaggcagaggctttccagtgttaatgccgaagtctcaacgctaaaagacaccaggttactgaccttcaaggcctttgcccagctcttcatcctgggctgctcctgggtgctgggcatttttcagattggacctgtggcaggtgtcatggcttacctgttcaccatcatcaacagcctgcagggggccttcatcttcctcatccactgtctgctcaacggccaggtacgagaagaatacaagaggtggatcactgggaagacgaagcccagctcccagtcccagacctcaaggatcttgctgtcctccatgccatccgcttccaagacgggtgctagcaaaggagaagaactcttcactggagttgtcccaattcttgttgaattagatggtgatgttaacggccacaagttctctgtcagtggagagggtgaaggtgatgcaacatacggaaaacttaccctgaagttcatctgcactactggcaaactgcctgttccatggccaacactagtcactactctgtgctatggtgttcaatgcttttcaagatacccggatcatatgaaacggcatgactttttcaagagtgccatgcccgaaggttatgtacaggaaaggaccatcttcttcaaagatgacggcaactacaagacacgtgctgaagtcaagtttgaaggtgatacccttgttaatagaatcgagttaaaaggtattgacttcaaggaagatggcaacattctgggacacaaattggaatacaactataactcacacaatgtatacatcatggcagacaaacaaaagaatggaatcaaagtgaacttcaagacccgccacaacattgaagatggaagcgttcaactagcagaccattatcaacaaaatactccaattggcgatggccctgtccttttaccagacaaccattacctgtccacacaatctgccctttcgaaagatcccaacgaaaagagagaccacatggtccttcttgagtttgtaacagctgctgggattacacatggcatggatgaactgtacaactga

SEQ ID NO: 146 - DNA, 1800 bp, Human
atggcccccacagagccctggagccccagcccggggtcagcgccctgggactactcggggttggacggcctggaggagctggagctgtgtccggccggggacctgccctacggctacgtctacatccccgcgctctacctggcggccttcgccgtgggcctgctgggcaacgcctttgtggtgtggctgctggccgggcggcggggcccgcggcggctggtggataccttcgtgctgcacctggcggcagctgacctgggcttcgtgctcacgctgccgctgtgggccgcggcggcggcgctaggcggccgctggccgttcggcgatggcctctgcaagctcagcagcttcgcgctggcgggcacgcgctgcgcgggcgcgctgctgctggcgggcatgagcgtggaccgctacctggccgtggtgaagctgctcgaggcgaggccactgcgcaccccgcgctgcgcgctggcctcgtgctgcggcgtctgggccgtggcgctgctggccggcctgccctccctggtctaccgggggttgcagcccctgcctgggggccaggacagccagtgcggcgaggagccctcccacgccttccagggcctcagcttgctgctgctgctgctgaccttcgtgctgcccctggtcgtcaccctcttctgctactgccgcatctcgcgccgcctgcgacggccgccgcacgtgggtcgggcccggaggaactcgctgcgcatcatcttcgccatcgagagcacgtttgtgggctcctggctgcccttcagcgccctgcgggccgtcttccacctggcgcgtctgggggcgctgccgctgccgtgccccctgctgctggcgctgcgctggggcctcaccattgccacctgcctggccttcgtcaacagctgcgccaacccgctcatctacctcctgctggaccgctcattccgagcccgggcgctggacggggcctgcgggcgcaccggccgcctggcgcgaaggatcagctcagcctcctcgctctccagggacgacagttccgtgttccgttgccgggcccaggccgcgaacactgcctcggcctcctgggctagcaaaggagaagaactcttcactggagttgtcccaattcttgttgaattagatggtgatgttaacggccacaagttctctgtcagtggagagggtgaaggtgatgcaacatacggaaaacttaccctgaagttcatctgcactactggcaaactgcctgttccatggccaacactagtcactactctgtgctatggtgttcaatgcttttcaagatacccggatcatatgaaacggcatgactttttcaagagtgccatgcccgaaggttatgtacaggaaaggaccatcttcttcaaagatgacggcaactacaagacacgtgctgaagtcaagtttgaaggtgatacccttgttaatagaatcgagttaaaaggtattgacttcaaggaagatggcaacattctgggacacaaattggaatacaactataactcacacaatgtatacatcatggcagacaaacaaaagaatggaatcaaagtgaacttcaagacccgccacaacattgaagatggaagcgttcaactagcagaccattatcaacaaaatactccaattggcgatggccctgtccttttaccagacaaccattacctgtccacacaatctgccctttcgaaagatcccaacgaaaagagagaccacatggtccttcttgagtttgtaacagctgctgggattacacatggcatggatgaactgtacaactga

SEQ ID NO: 147 - DNA, 1674 bp, Human
atgagtcagcaaaacaccagtggggactgcctgtttgacggtgtcaacgagctgatgaaaaccctacagtttgcagtccacatccccaccttcgtcctgggcctgctcctcaacctgctggccatccatggcttcagcaccttccttaagaacaggtggcccgattatgctgccacctccatctacatgatcaacctggcagtctttgacctgctgctggtgctctccctcccattcaagatggtcctgtcccaggtacagtcccccttcccgtccctgtgcaccctggtggagtgcctttacttcgtcagcatgtacggaagcgtcttcaccatctgcttcatcagcatggaccggttcttggccatccgttacccgctactggtgagccacctccggtcccccaggaagatctttgggatctgctgcaccatctgggtcctggtgtggaccggaagcatccctatctacagtttccatgggaaagtggaaaaatacatgtgcttccacaacatgtctgatgatacctggagcgccaaggtcttcttcccgctggaggtgtttggcttcctccttcccatgggcatcatgggcttctgctgctccaggagcatccacatcctgctgggccgccgagaccacacccaggactgggtgcagcagaaagcctgcatctacagcatcgcagccagcctggctgtcttcgtggtctccttcctcccagtccacctggggttcttcctgcagttcctggtgagaaacagctttatcgtagagtgcagagccaagcagagcatcagcttcttcttgcaattgtccatgtgtttctccaacgtcaactgctgcctggatgttttctgctactactttgtcatcaaagaattccgcatgaacatcagggcccaccggccttccagggtccagctggtcctgcaggacaccacgatctcccggggcgctagcaaaggagaagaactcttcactggagttgtcccaattcttgttgaattagatggtgatgttaacggccacaagttctctgtcagtggagagggtgaaggtgatgcaacatacggaaaacttaccctgaagttcatctgcactactggcaaactgcctgttccatggccaacactagtcactactctgtgctatggtgttcaatgcttttcaagatacccggatcatatgaaacggcatgactttttcaagagtgccatgcccgaaggttatgtacaggaaaggaccatcttcttcaaagatgacggcaactacaagacacgtgctgaagtcaagtttgaaggtgatacccttgttaatagaatcgagttaaaaggtattgacttcaaggaagatggcaacattctgggacacaaattggaatacaactataactcacacaatgtatacatcatggcagacaaacaaaagaatggaatcaaagtgaacttcaagacccgccacaacattgaagatggaagcgttcaactagcagaccattatcaacaaaatactccaattggcgatggccctgtccttttaccagacaaccattacctgtccacacaatctgccctttcgaaagatcccaacgaaaagagagaccacatggtccttcttgagtttgtaacagctgctgggattacacatggcatggatgaactgtacaactga

SEQ ID NO: 148 - DNA, 2127 bp, Human
atggacactaccatggaagctgacctgggtgccactggccacaggccccgcacagagcttgatgatgaggactcctacccccaaggtggctgggacacggttttcctggtggccctgctgctccttgggctgccagccaatgggttgatggcgtggctggccggctcccaggcccggcatggagctggcacgcgtctggcgctgctcctgctcagcctggccctctctgacttcttgttcctggcagcagcggccttccagatcctagagatccggcatgggggacactggccgctggggacagctgcctgccgcttctactacttcctatggggcgtgtcctactcctccggcctcttcctgctggccgccctcagcctcgaccgctgcctgctggcgctgtgcccacactggtaccctgggcaccgcccagtccgcctgcccctctgggtctgcgccggtgtctgggtgctggccacactcttcagcgtgccctggctggtcttccccgaggctgccgtctggtggtacgacctggtcatctgcctggacttctgggacagcgaggagctgtcgctgaggatgctggaggtcctggggggcttcctgcctttcctcctgctgctcgtctgccacgtgctcacccaggccacagcctgtcgcacctgccaccgccaacagcagcccgcagcctgccggggcttcgcccgtgtggccaggaccattctgtcagcctatgtggtcctgaggctgccctaccagctggcccagctgctctacctggccttcctgtgggacgtctactctggctacctgctctgggaggccctggtctactccgactacctgatcctactcaacagctgcctcagccccttcctctgcctcatggccagtgccgacctccggaccctgctgcgctccgtgctctcgtccttcgcggcagctctctgcgaggagcggccgggcagcttcacgcccactgagccacagacccagctagattctgagggtccaactctgccagagccgatggcagaggcccagtcacagatggatcctgtggcccagcctcaggtgaaccccacactccagccacgatcggatcccacagctcagccacagctgaaccctacggcccagccacagtcggatcccacagcccagccacagctgaacctcatggcccagccacagtcagattctgtggcccagccacaggcagacactaacgtccagacccctgcacctgctgccagttctgtgcccagtccctgtgatgaagcttccccaaccccatcctcgcatcctaccccaggggcccttgaggacccagccacacctcctgcctctgaaggagaaagccccagcagcaccccgccagaggcggccccgggcgcaggccccacggctagcaaaggagaagaactcttcactggagttgtcccaattcttgttgaattagatggtgatgttaacggccacaagttctctgtcagtggagagggtgaaggtgatgcaacatacggaaaacttaccctgaagttcatctgcactactggcaaactgcctgttccatggccaacactagtcactactctgtgctatggtgttcaatgcttttcaagatacccggatcatatgaaacggcatgactttttcaagagtgccatgcccgaaggttatgtacaggaaaggaccatcttcttcaaagatgacggcaactacaagacacgtgctgaagtcaagtttgaaggtgatacccttgttaatagaatcgagttaaaaggtattgacttcaaggaagatggcaacattctgggacacaaattggaatacaactataactcacacaatgtatacatcatggcagacaaacaaaagaatggaatcaaagtgaacttcaagacccgccacaacattgaagatggaagcgttcaactagcagaccattatcaacaaaatactccaattggcgatggccctgtccttttaccagacaaccattacctgtccacacaatctgccctttcgaaagatcccaacgaaaagagagaccacatggtccttcttgagtttgtaacagctgctgggattacacatggcatggatgaactgtacaactga

SEQ ID NO: 149 - DNA, 1914 bp, Human
atgaggcccgagcgtccccggccgcgcggcagcgcccccggcccgatggagaccccgccgtgggacccagcccgcaacgactcgctgccgcccacgctgaccccggccgtgcccccctacgtgaagcttggcctcaccgtcgtctacaccgtgttctacgcgctgctcttcgtgttcatctacgtgcagctctggctggtgctgcgttaccgccacaagcggctcagctaccagagcgtcttcctctttctctgcctcttctgggcctccctgcggaccgtcctcttctccttctacttcaaagacttcgtggcggccaattcgctcagccccttcgtcttctggctgctctactgcttccctgtgtgcctgcagtttttcaccctcacgctgatgaacttgtacttcacgcaggtgattttcaaagccaagtcaaaatattctccagaattactcaaataccggttgcccctctacctggcctccctcttcatcagccttgttttcctgttggtgaatttaacctgtgctgtgctggtaaagacgggaaattgggagaggaaggttatcgtctctgtgcgagtggccattaatgacacgctcttcgtgctgtgtgccgtctctctctccatctgtctctacaaaatctctaagatgtccttagccaacatttacttggagtccaagggctcctccgtgtgtcaagtgactgccatcggtgtcaccgtgatactgctttacacctctcgggcctgctacaacctgttcatcctgtcattttctcagaacaagagcgtccattcctttgattatgactggtacaatgtatcagaccaggcagatttgaagaatcagctgggagatgctggatacgtattatttggagtggtgttatttgtttgggaactcttacctaccaccttagtcgtttatttcttccgagttagaaatcctacaaaggaccttaccaaccctggaatggtccccagccatggattcagtcccagatcttatttctttgacaaccctcgaagatatgacagtgatgatgaccttgcctggaacattgcccctcagggacttcagggaggttttgctccagattactatgattggggacaacaaactaacagcttcctggcacaagcaggaactttgcaagactcaactttggatcctgacaaaccaagccttggggctagcaaaggagaagaactcttcactggagttgtcccaattcttgttgaattagatggtgatgttaacggccacaagttctctgtcagtggagagggtgaaggtgatgcaacatacggaaaacttaccctgaagttcatctgcactactggcaaactgcctgttccatggccaacactagtcactactctgtgctatggtgttcaatgcttttcaagatacccggatcatatgaaacggcatgactttttcaagagtgccatgcccgaaggttatgtacaggaaaggaccatcttcttcaaagatgacggcaactacaagacacgtgctgaagtcaagtttgaaggtgatacccttgttaatagaatcgagttaaaaggtattgacttcaaggaagatggcaacattctgggacacaaattggaatacaactataactcacacaatgtatacatcatggcagacaaacaaaagaatggaatcaaagtgaacttcaagacccgccacaacattgaagatggaagcgttcaactagcagaccattatcaacaaaatactccaattggcgatggccctgtccttttaccagacaaccattacctgtccacacaatctgccctttcgaaagatcccaacgaaaagagagaccacatggtccttcttgagtttgtaacagctgctgggattacacatggcatggatgaactgtacaactga

SEQ ID NO: 150 - DNA, 1974 bp, Human
atggtcttctcggcagtgttgactgcgttccataccgggacatccaacacaacatttgtcgtgtatgaaaacacctacatgaatattacactccctccaccattccagcatcctgacctcagtccattgcttagatatagttttgaaaccatggctcccactggtttgagttccttgaccgtgaatagtacagctgtgcccacaacaccagcagcatttaagagcctaaacttgcctcttcagatcaccctttctgctataatgatattcattctgtttgtgtcttttcttgggaacttggttgtttgcctcatggtttaccaaaaagctgccatgaggtctgcaattaacatcctccttgccagcctagcttttgcagacatgttgcttgcagtgctgaacatgccctttgccctggtaactattcttactacccgatggatttttgggaaattcttctgtagggtatctgctatgtttttctggttatttgtgatagaaggagtagccatcctgctcatcattagcatagataggttccttattatagtccagaggcaggataagctaaacccatatagagctaaggttctgattgcagtttcttgggcaacttccttttgtgtagcttttcctttagccgtaggaaaccccgacctgcagataccttcccgagctccccagtgtgtgtttgggtacacaaccaatccaggctaccaggcttatgtgattttgatttctctcatttctttcttcatacccttcctggtaatactgtactcatttatgggcatactcaacacccttcggcacaatgccttgaggatccatagctaccctgaaggtatatgcctcagccaggccagcaaactgggtctcatgagtctgcagagacctttccagatgagcattgacatgggctttaaaacacgtgccttcaccactattttgattctctttgctgtcttcattgtctgctgggccccattcaccacttacagccttgtggcaacattcagtaagcacttttactatcagcacaacttttttgagattagcacctggctactgtggctctgctacctcaagtctgcattgaatccgctgatctactactggaggattaagaaattccatgatgcttgcctggacatgatgcctaagtccttcaagtttttgccgcagctccctggtcacacaaagcgacggatacgtcctagtgctgtctatgtgtgtggggaacatcggacggtggtggctagcaaaggagaagaactcttcactggagttgtcccaattcttgttgaattagatggtgatgttaacggccacaagttctctgtcagtggagagggtgaaggtgatgcaacatacggaaaacttaccctgaagttcatctgcactactggcaaactgcctgttccatggccaacactagtcactactctgtgctatggtgttcaatgcttttcaagatacccggatcatatgaaacggcatgactttttcaagagtgccatgcccgaaggttatgtacaggaaaggaccatcttcttcaaagatgacggcaactacaagacacgtgctgaagtcaagtttgaaggtgatacccttgttaatagaatcgagttaaaaggtattgacttcaaggaagatggcaacattctgggacacaaattggaatacaactataactcacacaatgtatacatcatggcagacaaacaaaagaatggaatcaaagtgaacttcaagacccgccacaacattgaagatggaagcgttcaactagcagaccattatcaacaaaatactccaattggcgatggccctgtccttttaccagacaaccattacctgtccacacaatctgccctttcgaaagatcccaacgaaaagagagaccacatggtccttcttgagtttgtaacagctgctgggattacacatggcatggatgaactgtacaactga

SEQ ID NO: 151 - DNA, 1836 bp, Human
atggccaacactaccggagagcctgaggaggtgagcggcgctctgtccccaccgtccgcatcagcttatgtgaagctggtactgctgggactgattatgtgcgtgagcctggcgggtaacgccatcttgtccctgctggtgctcaaggagcgtgccctgcacaaggctccttactacttcctgctggacctgtgcctggccgatggcatacgctctgccgtctgcttcccctttgtgctggcttctgtgcgccacggctcttcatggaccttcagtgcactcagctgcaagattgtggcctttatggccgtgctcttttgcttccatgcggccttcatgctgttctgcatcagcgtcacccgctacatggccatcgcccaccaccgcttctacgccaagcgcatgacactctggacatgcgcggctgtcatctgcatggcctggaccctgtctgtggccatggccttcccacctgtctttgacgtgggcacctacaagtttattcgggaggaggaccagtgcatctttgagcatcgctacttcaaggccaatgacacgctgggcttcatgcttatgttggctgtgctcatggcagctacccatgctgtctacggcaagctgctcctcttcgagtatcgtcaccgcaagatgaagccagtgcagatggtgccagccatcagccagaactggacattccatggtcccggggccaccggccaggctgctgccaactggatcgccggctttggccgtgggcccatgccaccaaccctgctgggtatccggcagaatgggcatgcagccagccggcggctactgggcatggacgaggtcaagggtgaaaagcagctgggccgcatgttctacgcgatcacactgctctttctgctcctctggtcaccctacatcgtggcctgctactggcgagtgtttgtgaaagcctgtgctgtgccccaccgctacctggccactgctgtttggatgagcttcgcccaggctgccgtcaacccaattgtctgcttcctgctcaacaaggacctcaagaagtgcctgaggactcacgccccctgctggggcacaggaggtgccccggctcccagagaaccctactgtgtcatggctagcaaaggagaagaactcttcactggagttgtcccaattcttgttgaattagatggtgatgttaacggccacaagttctctgtcagtggagagggtgaaggtgatgcaacatacggaaaacttaccctgaagttcatctgcactactggcaaactgcctgttccatggccaacactagtcactactctgtgctatggtgttcaatgcttttcaagatacccggatcatatgaaacggcatgactttttcaagagtgccatgcccgaaggttatgtacaggaaaggaccatcttcttcaaagatgacggcaactacaagacacgtgctgaagtcaagtttgaaggtgatacccttgttaatagaatcgagttaaaaggtattgacttcaaggaagatggcaacattctgggacacaaattggaatacaactataactcacacaatgtatacatcatggcagacaaacaaaagaatggaatcaaagtgaacttcaagacccgccacaacattgaagatggaagcgttcaactagcagaccattatcaacaaaatactccaattggcgatggccctgtccttttaccagacaaccattacctgtccacacaatctgccctttcgaaagatcccaacgaaaagagagaccacatggtccttcttgagtttgtaacagctgctgggattacacatggcatggatgaactgtacaactga

SEQ ID NO: 152 - DNA, 2397 bp, Human
atggatctgaagacagtgctctccctgccccgctacccaggggagttcctgcaccccgtggtgtacgcgtgcacggccgtcatgctgctctgcctcctggcctccttcgtcacctacatcgtgcaccagagcgccatccgcatcagccgcaagggccggcacacgctcctgaatttctgcttccacgcggccctgaccttcactgtgttcgccggcggcatcaatcgcaccaagtaccccatcctgtgccaggcggtgggcatcgtgctgcactattctacactgtccaccatgctgtggataggagtgaccgccaggaacatctacaagcaggtgaccaagaaggcccctctgtgcctggacacagaccagccaccgtaccccaggcagcccctgctcaggttttacctcgtcagcggaggggtcccctttatcatctgtggggtcacggctgccacgaacatcaggaattacgggacagaggacgaggacacggcgtactgctggatggcctgggagcccagcctgggcgccttctacggcccagccgccatcatcaccctggtcacctgtgtgtacttcctgggcacctacgtgcagctgcggcgccacccagggcgcaggtacgagctgcgcacacagcccgaggagcagcggcggctggcgacacccgagggcggccgtgggatccggccaggcaccccacccgcacacgatgcccccggcgcctccgtgctgcagaacgagcactcattccaggcacagctgcgcgccgccgccttcacgctgttcctgttcacggccacgtgggccttcggggcgctggcggtgtcacagggccacttcctggacatggtcttcagctgcctgtacggcgccttctgcgtgaccctgggactcttcgtgctcatccaccactgcgccaagcgtgaggacgtgtggcagtgctggtgggcatgctgcccgccccgcaaggacgcccaccccgcacttgacgccaacggggccgcgctgggccgcgccgcctgcctgcactcgccgggactgggccagccacggggcttcgcgcacccaccgggcccctgcaagatgaccaacctgcaggccgcgcagggccacgccagttgcctgtcaccggccaccccgtgctgcgccaagatgcactgcgagccactgacggcggacgaggcgcacgtgcacctgcaggaggagggcgccttcgggcacgacccccacctgcacgggtgccttcagggcagaactaagccgccctactttagccggcacccagcagaggagcccgagtacgcctaccacatcccatccagcctggatggcagcccccgcagctcgcgcacagacagcccccccagctctctggatggcccggcggggacacacacgctggcctgctgcacccagggcgaccccttccccatggtcacccagcccgagggcagtgatgggagccctgccctctacagctgccccacgcagccgggcagggaggcagcgctcgggcccggccacttggagatgctgcggaggacacagtccctgccctttggtggccccagccagaacgggctgcccaagggtaaattgctagaaggcctgccgtttggcaccgacgggaccggcaacatccgaacgggaccctggaaaaacgaaactactgtggctagcaaaggagaagaactcttcactggagttgtcccaattcttgttgaattagatggtgatgttaacggccacaagttctctgtcagtggagagggtgaaggtgatgcaacatacggaaaacttaccctgaagttcatctgcactactggcaaactgcctgttccatggccaacactagtcactactctgtgctatggtgttcaatgcttttcaagatacccggatcatatgaaacggcatgactttttcaagagtgccatgcccgaaggttatgtacaggaaaggaccatcttcttcaaagatgacggcaactacaagacacgtgctgaagtcaagtttgaaggtgatacccttgttaatagaatcgagttaaaaggtattgacttcaaggaagatggcaacattctgggacacaaattggaatacaactataactcacacaatgtatacatcatggcagacaaacaaaagaatggaatcaaagtgaacttcaagacccgccacaacattgaagatggaagcgttcaactagcagaccattatcaacaaaatactccaattggcgatggccctgtccttttaccagacaaccattacctgtccacacaatctgccctttcgaaagatcccaacgaaaagagagaccacatggtccttcttgagtttgtaacagctgctgggattacacatggcatggatgaactgtacaactga

SEQ ID NO: 153 - DNA, 1674 bp, Human
atgacaaacagttcgttcttctgcccagtttataaagatctggagccattcacgtattttttttatttagttttccttgttggaattattggaagttgttttgcaacctgggcttttatacagaagaatacgaatcacaggtgtgtgagcatctacttaattaatttgcttacagccgatttcctgcttactctggcattaccagtgaaaattgttgttgacttgggtgtggcaccttggaagctgaagatattccactgccaagtaacagcctgcctcatctatatcaatatgtatttatcaattatcttcttagcatttgtcagcattgaccgctgtcttcagctgacacacagctgcaagatctaccgaatacaagaacccggatttgccaaaatgatatcaaccgttgtgtggctaatggtccttcttataatggtgccaaatatgatgattcccatcaaagacatcaaggaaaagtcaaatgtgggttgtatggagtttaaaaaggaatttggaagaaattggcatttgctgacaaatttcatatgtgtagcaatatttttaaatttctcagccatcattttaatatccaattgccttgtaattcgacagctctacagaaacaaagataatgaaaattacccaaatgtgaaaaaggctctcatcaacatacttttagtgaccacgggctacatcatatgctttgttccttaccacattgtccgaatcccgtataccctcagccagacagaagtcataactgattgctcaaccaggatttcactcttcaaagccaaagaggctacactgctcctggctgtgtcgaacctgtgctttgatcctatcctgtactatcacctctcaaaagcattccgctcaaaggtcactgagacttttgcctcacctaaagagaccaaggctcagaaagaaaaattaagatgtgaaaataatgcagctagcaaaggagaagaactcttcactggagttgtcccaattcttgttgaattagatggtgatgttaacggccacaagttctctgtcagtggagagggtgaaggtgatgcaacatacggaaaacttaccctgaagttcatctgcactactggcaaactgcctgttccatggccaacactagtcactactctgtgctatggtgttcaatgcttttcaagatacccggatcatatgaaacggcatgactttttcaagagtgccatgcccgaaggttatgtacaggaaaggaccatcttcttcaaagatgacggcaactacaagacacgtgctgaagtcaagtttgaaggtgatacccttgttaatagaatcgagttaaaaggtattgacttcaaggaagatggcaacattctgggacacaaattggaatacaactataactcacacaatgtatacatcatggcagacaaacaaaagaatggaatcaaagtgaacttcaagacccgccacaacattgaagatggaagcgttcaactagcagaccattatcaacaaaatactccaattggcgatggccctgtccttttaccagacaaccattacctgtccacacaatctgccctttcgaaagatcccaacgaaaagagagaccacatggtccttcttgagtttgtaacagctgctgggattacacatggcatggatgaactgtacaactga

SEQ ID NO: 154 - DNA, 1791 bp, Human
atggggttcaacttgacgcttgcaaaattaccaaataacgagctgcacggccaagagagtcacaattcaggcaacaggagcgacgggccaggaaagaacaccacccttcacaatgaatttgacacaattgtcttgccggtgctttatctcattatatttgtggcaagcatcttgctgaatggtttagcagtgtggatcttcttccacattaggaataaaaccagcttcatattctatctcaaaaacatagtggttgcagacctcataatgacgctgacatttccatttcgaatagtccatgatgcaggatttggaccttggtacttcaagtttattctctgcagatacacttcagttttgttttatgcaaacatgtatacttccatcgtgttccttgggctgataagcattgatcgctatctgaaggtggtcaagccatttggggactctcggatgtacagcataaccttcacgaaggttttatctgtttgtgtttgggtgatcatggctgttttgtctttgccaaacatcatcctgacaaatggtcagccaacagaggacaatatccatgactgctcaaaacttaaaagtcctttgggggtcaaatggcatacggcagtcacctatgtgaacagctgcttgtttgtggccgtgctggtgattctgatcggatgttacatagccatatccaggtacatccacaaatccagcaggcaattcataagtcagtcaagccgaaagcgaaaacataaccagagcatcagggttgttgtggctgtgttttttacctgctttctaccatatcacttgtgcagaattccttttacttttagtcacttagacaggcttttagatgaatctgcacaaaaaatcctatattactgcaaagaaattacacttttcttgtctgcgtgtaatgtttgcctggatccaataatttactttttcatgtgtaggtcattttcaagaaggctgttcaaaaaatcaaatatcagaaccaggagtgaaagcatcagatcactgcaaagtgtgagaagatcggaagttcgcatatattatgattacactgatgtggctagcaaaggagaagaactcttcactggagttgtcccaattcttgttgaattagatggtgatgttaacggccacaagttctctgtcagtggagagggtgaaggtgatgcaacatacggaaaacttaccctgaagttcatctgcactactggcaaactgcctgttccatggccaacactagtcactactctgtgctatggtgttcaatgcttttcaagatacccggatcatatgaaacggcatgactttttcaagagtgccatgcccgaaggttatgtacaggaaaggaccatcttcttcaaagatgacggcaactacaagacacgtgctgaagtcaagtttgaaggtgatacccttgttaatagaatcgagttaaaaggtattgacttcaaggaagatggcaacattctgggacacaaattggaatacaactataactcacacaatgtatacatcatggcagacaaacaaaagaatggaatcaaagtgaacttcaagacccgccacaacattgaagatggaagcgttcaactagcagaccattatcaacaaaatactccaattggcgatggccctgtccttttaccagacaaccattacctgtccacacaatctgccctttcgaaagatcccaacgaaaagagagaccacatggtccttcttgagtttgtaacagctgctgggattacacatggcatggatgaactgtacaactga

SEQ ID NO: 155 - DNA, 1719 bp, Human
atgctggggatcatggcatggaatgcaacttgcaaaaactggctggcagcagaggctgccctggaaaagtactacctttccattttttatgggattgagttcgttgtgggagtccttggaaataccattgttgtttacggctacatcttctctctgaagaactggaacagcagtaatatttatctctttaacctctctgtctctgacttagcttttctgtgcaccctccccatgctgataaggagttatgccaatggaaactggatatatggagacgtgctctgcataagcaaccgatatgtgcttcatgccaacctctataccagcattctctttctcacttttatcagcatagatcgatacttgataattaagtatcctttccgagaacaccttctgcaaaagaaagagtttgctattttaatctccttggccatttgggttttagtaaccttagagttactacccatacttccccttataaatcctgttataactgacaatggcaccacctgtaatgattttgcaagttctggagaccccaactacaacctcatttacagcatgtgtctaacactgttggggttccttattcctctttttgtgatgtgtttcttttattacaagattgctctcttcctaaagcagaggaataggcaggttgctactgctctgccccttgaaaagcctctcaacttggtcatcatggcagtggtaatcttctctgtgccttttacaccctatcacgtcatgcggaatgtgaggatcgcttcacgcctggggagttggaagcagtatcagtgcactcaggtcgtcatcaactccttttacattgtgacacggcctttggcctttctgaacagtgtcatcaaccctgtcttctattttcttttgggagatcacttcagggacatgctgatgaatcaactgagacacaacttcaaatcccttacatcctttagcagatgggctcatgaactcctactttcattcagagaaaaggctagcaaaggagaagaactcttcactggagttgtcccaattcttgttgaattagatggtgatgttaacggccacaagttctctgtcagtggagagggtgaaggtgatgcaacatacggaaaacttaccctgaagttcatctgcactactggcaaactgcctgttccatggccaacactagtcactactctgtgctatggtgttcaatgcttttcaagatacccggatcatatgaaacggcatgactttttcaagagtgccatgcccgaaggttatgtacaggaaaggaccatcttcttcaaagatgacggcaactacaagacacgtgctgaagtcaagtttgaaggtgatacccttgttaatagaatcgagttaaaaggtattgacttcaaggaagatggcaacattctgggacacaaattggaatacaactataactcacacaatgtatacatcatggcagacaaacaaaagaatggaatcaaagtgaacttcaagacccgccacaacattgaagatggaagcgttcaactagcagaccattatcaacaaaatactccaattggcgatggccctgtccttttaccagacaaccattacctgtccacacaatctgccctttcgaaagatcccaacgaaaagagagaccacatggtccttcttgagtttgtaacagctgctgggattacacatggcatggatgaactgtacaactga

SEQ ID NO: 156 - DNA, 1728 bp, Human
atgagagctgtcttcatccaaggtgctgaagagcaccctgcggcattctgctaccaggtgaatgggtcttgccccaggacagtacatactctgggcatccagttggtcatctacctggcctgtgcagcaggcatgctgattatcgtgctagggaatgtatttgtggcatttgctgtgtcctacttcaaagcgcttcacacgcccaccaacttcctgctgctctccctggccctggctgacatgtttctgggtctgctggtgctgcccctcagcaccattcgctcagtggagagctgctggttcttcggggacttcctctgccgcctgcacacctacctggacaccctcttctgcctcacctccatcttccatctctgtttcatttccattgaccgccactgtgccatctgtgaccccctgctctatccctccaagttcacagtgagggtggctctcaggtacatcctggcaggatggggggtgcccgcagcatacacttcgttattcctctacacagatgtggtagagacaaggctcagccagtggctggaagagatgccttgtgtgggcagttgccagctgctgctcaataaattttggggctggttaaacttccctttgttctttgtcccctgcctcattatgatcagcttgtatgtgaagatctttgtggttgctaccagacaggctcagcagattaccacattgagcaaaagcctggctggggctgccaagcatgagagaaaagctgccaagaccctgggcattgctgtgggcatatacctcttgtgctggctgcccttcaccatagacacgatggtcgacagcctccttcactttatcacacccccactggtctttgacatctttatctggtttgcttacttcaactcagcctgcaaccccatcatctatgtcttttcctaccagtggtttcggaaggcactgaaactcacactgagccagaaggtcttctcaccgcagacacgcactgttgatttgtaccaagaagctagcaaaggagaagaactcttcactggagttgtcccaattcttgttgaattagatggtgatgttaacggccacaagttctctgtcagtggagagggtgaaggtgatgcaacatacggaaaacttaccctgaagttcatctgcactactggcaaactgcctgttccatggccaacactagtcactactctgtgctatggtgttcaatgcttttcaagatacccggatcatatgaaacggcatgactttttcaagagtgccatgcccgaaggttatgtacaggaaaggaccatcttcttcaaagatgacggcaactacaagacacgtgctgaagtcaagtttgaaggtgatacccttgttaatagaatcgagttaaaaggtattgacttcaaggaagatggcaacattctgggacacaaattggaatacaactataactcacacaatgtatacatcatggcagacaaacaaaagaatggaatcaaagtgaacttcaagacccgccacaacattgaagatggaagcgttcaactagcagaccattatcaacaaaatactccaattggcgatggccctgtccttttaccagacaaccattacctgtccacacaatctgccctttcgaaagatcccaacgaaaagagagaccacatggtccttcttgagtttgtaacagctgctgggattacacatggcatggatgaactgtacaactga

SEQ ID NO: 157 - DNA, 1743 bp, Human
atgaccagcaatttttcccaacctgttgtgcagctttgctatgaggatgtgaatggatcttgtattgaaactccctattctcctgggtcccgggtaattctgtacacggcgtttagctttgggtctttgctggctgtatttggaaatctcttagtaatgacttctgttcttcattttaagcagctgcactctccaaccaattttctcattgcctctctggcctgtgctgacttcttggtaggtgtgactgtgatgcttttcagcatggtcaggacggtggagagctgctggtattttggagccaaattttgtactcttcacagttgctgtgatgtggcattttgttactcttctgtcctccacttgtgcttcatctgcatcgacaggtacattgtggttactgatcccctggtctatgctaccaagttcaccgtgtctgtgtcgggaatttgcatcagcgtgtcctggattctgcctctcacgtacagcggtgctgtgttctacacaggtgtcaatgatgatgggctggaggaattagtaagtgctctcaactgcgtaggtggctgtcaaattattgtaagtcaaggctgggtgttgatagattttctgttattcttcatacctacccttgttatgataattctttacagtaagatttttcttatagctaaacaacaagctataaaaattgaaactactagtagcaaagtagaatcatcctcagagagttataaaatcagagtggccaagagagagaggaaagcagctaaaaccctgggggtcacggtactagcatttgttatttcatggttaccgtatacagttgatatattaattgatgcctttatgggcttcctgacccctgcctatatctatgaaatttgctgttggagtgcttattataactcagccatgaatcctttgatttatgctctattttatccttggtttaggaaagccataaaacttattttaagtggagatgttttaaaggctagttcatcaaccattagtttatttttagaagctagcaaaggagaagaactcttcactggagttgtcccaattcttgttgaattagatggtgatgttaacggccacaagttctctgtcagtggagagggtgaaggtgatgcaacatacggaaaacttaccctgaagttcatctgcactactggcaaactgcctgttccatggccaacactagtcactactctgtgctatggtgttcaatgcttttcaagatacccggatcatatgaaacggcatgactttttcaagagtgccatgcccgaaggttatgtacaggaaaggaccatcttcttcaaagatgacggcaactacaagacacgtgctgaagtcaagtttgaaggtgatacccttgttaatagaatcgagttaaaaggtattgacttcaaggaagatggcaacattctgggacacaaattggaatacaactataactcacacaatgtatacatcatggcagacaaacaaaagaatggaatcaaagtgaacttcaagacccgccacaacattgaagatggaagcgttcaactagcagaccattatcaacaaaatactccaattggcgatggccctgtccttttaccagacaaccattacctgtccacacaatctgccctttcgaaagatcccaacgaaaagagagaccacatggtccttcttgagtttgtaacagctgctgggattacacatggcatggatgaactgtacaactga

SEQ ID NO: 158 - DNA, 1752 bp, Human
atgagcagcaattcatccctgctggtggctgtgcagctgtgctacgcgaacgtgaatgggtcctgtgtgaaaatccccttctcgccgggatcccgggtgattctgtacatagtgtttggctttggggctgtgctggctgtgtttggaaacctcctggtgatgatttcaatcctccatttcaagcagctgcactctccgaccaattttctcgttgcctctctggcctgcgctgatttcttggtgggtgtgactgtgatgcccttcagcatggtcaggacggtggagagctgctggtattttgggaggagtttttgtactttccacacctgctgtgatgtggcattttgttactcttctctctttcacttgtgcttcatctccatcgacaggtacattgcggttactgaccccctggtctatcctaccaagttcaccgtatctgtgtcaggaatttgcatcagcgtgtcctggatcctgcccctcatgtacagcggtgctgtgttctacacaggtgtctatgacgatgggctggaggaattatctgatgccctaaactgtataggaggttgtcagaccgttgtaaatcaaaactgggtgttgacagattttctatccttctttatacctacctttattatgataattctgtatggtaacatatttcttgtggctagacgacaggcgaaaaagatagaaaatactggtagcaagacagaatcatcctcagagagttacaaagccagagtggccaggagagagagaaaagcagctaaaaccctgggggtcacagtggtagcatttatgatttcatggttaccatatagcattgattcattaattgatgcctttatgggctttataacccctgcctgtatttatgagatttgctgttggtgtgcttattataactcagccatgaatcctttgatttatgctttattttacccatggtttaggaaagcaataaaagttattgtaactggtcaggttttaaagaacagttcagcaaccatgaatttgttttctgaacatatagctagcaaaggagaagaactcttcactggagttgtcccaattcttgttgaattagatggtgatgttaacggccacaagttctctgtcagtggagagggtgaaggtgatgcaacatacggaaaacttaccctgaagttcatctgcactactggcaaactgcctgttccatggccaacactagtcactactctgtgctatggtgttcaatgcttttcaagatacccggatcatatgaaacggcatgactttttcaagagtgccatgcccgaaggttatgtacaggaaaggaccatcttcttcaaagatgacggcaactacaagacacgtgctgaagtcaagtttgaaggtgatacccttgttaatagaatcgagttaaaaggtattgacttcaaggaagatggcaacattctgggacacaaattggaatacaactataactcacacaatgtatacatcatggcagacaaacaaaagaatggaatcaaagtgaacttcaagacccgccacaacattgaagatggaagcgttcaactagcagaccattatcaacaaaatactccaattggcgatggccctgtccttttaccagacaaccattacctgtccacacaatctgccctttcgaaagatcccaacgaaaagagagaccacatggtccttcttgagtttgtaacagctgctgggattacacatggcatggatgaactgtacaactga

SEQ ID NO: 159 - DNA, 2556 bp, Human
atggggcccaccctagcggttcccaccccctatggctgtattggctgtaagctaccccagccagaatacccaccggctctaatcatctttatgttctgcgcgatggttatcaccatcgttgtagacctaatcggcaactccatggtcattttggctgtgacgaagaacaagaagctccggaattctggcaacatcttcgtggtcagtctctctgtggccgatatgctggtggccatctacccataccctttgatgctgcatgccatgtccattgggggctgggatctgagccagttacagtgccagatggtcgggttcatcacagggctgagtgtggtcggctccatcttcaacatcgtggcaatcgctatcaaccgttactgctacatctgccacagcctccagtacgaacggatcttcagtgtgcgcaatacctgcatctacctggtcatcacctggatcatgaccgtcctggctgtcctgcccaacatgtacattggcaccatcgagtacgatcctcgcacctacacctgcatcttcaactatctgaacaaccctgtcttcactgttaccatcgtctgcatccacttcgtcctccctctcctcatcgtgggtttctgctacgtgaggatctggaccaaagtgctggcggcccgtgaccctgcagggcagaatcctgacaaccaacttgctgaggttcgcaattttctaaccatgtttgtgatcttcctcctctttgcagtgtgctggtgccctatcaacgtgctcactgtcttggtggctgtcagtccgaaggagatggcaggcaagatccccaactggctttatcttgcagcctacttcatagcctacttcaacagctgcctcaacgctgtgatctacgggctcctcaatgagaatttccgaagagaatactggaccatcttccatgctatgcggcaccctatcatattcttccctggcctcatcagtgatattcgtgagatgcaggaggcccgtaccctggcccgcgcccgtgcccatgctcgcgaccaagctcgtgaacaagaccgtgcccatgcctgtcctgctgtggaggaaaccccgatgaatgtccggaatgttccattacctggtgatgctgcagctggccaccccgaccgtgcctctggccaccctaagccccattccagatcctcctctgcctatcgcaaatctgcctctacccaccacaagtctgtctttagccactccaaggctgcctctggtcacctcaagcctgtctctggccactccaagcctgcctctggtcaccccaagtctgccactgtctaccctaagcctgcctctgtccatttcaagggtgactctgtccatttcaagggtgactctgtccatttcaagcctgactctgttcatttcaagcctgcttccagcaaccccaagcccatcactggccaccatgtctctgctggcagccactccaagtctgccttcagtgctgccaccagccaccctaaacccatcaagccagctaccagccatgctgagcccaccactgctgactatcccaagcctgccactaccagccaccctaagcccgctgctgctgacaaccctgagctctctgcctcccattgccccgagatccctgccattgcccaccctgtgtctgacgacagtgacctccctgagtcggcctctagccctgccgctgggcccaccaagcctgctgccagccagctggagtctgacaccatcgctgaccttcctgaccctactgtagtcactaccagtaccaatgattaccatgatgtcgtggttgttgatgttgaagatgatcctgatgaaatggctgtggctagcaaaggagaagaactcttcactggagttgtcccaattcttgttgaattagatggtgatgttaacggccacaagttctctgtcagtggagagggtgaaggtgatgcaacatacggaaaacttaccctgaagttcatctgcactactggcaaactgcctgttccatggccaacactagtcactactctgtgctatggtgttcaatgcttttcaagatacccggatcatatgaaacggcatgactttttcaagagtgccatgcccgaaggttatgtacaggaaaggaccatcttcttcaaagatgacggcaactacaagacacgtgctgaagtcaagtttgaaggtgatacccttgttaatagaatcgagttaaaaggtattgacttcaaggaagatggcaacattctgggacacaaattggaatacaactataactcacacaatgtatacatcatggcagacaaacaaaagaatggaatcaaagtgaacttcaagacccgccacaacattgaagatggaagcgttcaactagcagaccattatcaacaaaatactccaattggcgatggccctgtccttttaccagacaaccattacctgtccacacaatctgccctttcgaaagatcccaacgaaaagagagaccacatggtccttcttgagtttgtaacagctgctgggattacacatggcatggatgaactgtacaactga

SEQ ID NO: 160 - DNA, 2688 bp, Human
atgaaaatgaagtcccaggcaaccatgatttgctgcttagtgttctttctgtccacagaatgttcccactatagatccaagattcacctaaaagctggagataaacttcaaagccctgaagggaaacccaagactggaaggatccaagagaaatgcgaaggaccttgtatttcttcttccaactgcagccagccctgtgctaaggactttcatggagaaataggatttacatgtaatcaaaaaaagtggcaaaaatcagctgaaacatgtacaagcctttctgtggaaaaactctttaaggactcaactggtgcatctcgcctttctgtagcagcaccatctatacctctgcatattctagactttcgagctccagagaccattgagagtgtagctcaaggaatccgtaagaactgcccctttgattatgcctgcatcactgacatggtgaaatcatcagaaacaacatctggaaatattgcatttatagtggagttattaaaaaatatttctacagacttgtctgataatgttactcgagagaaaatgaagagctatagtgaagtggccaaccacatcctcgacacagcagccatttcaaactgggctttcattcccaacaaaaatgccagctcggatttgttgcagtcagtgaatttgtttgccagacaactccacatccacaataattctgagaacattgtgaatgaactcttcattcagacaaaagggtttcacatcaaccataatacctcagagaaaagcctcaatttctccatgagcatgaacaataccacagaagatatcttaggaatggtacagattcccaggcaagagctaaggaagctgtggccaaatgcatcccaagccattagcatagctttcccaaccttgggggctatcctgagagaagcccacttgcaaaatgtgagtcttcccagacaggtaaatggtctggtgctatcagtggttttaccagaaaggttgcaagaaatcatactcaccttcgaaaagatcaataaaacccgcaatgccagagcccagtgtgttggctggcactccaagaaaaggagatgggatgagaaagcgtgccaaatgatgttggatatcaggaacgaagtgaaatgccgctgtaactacaccagtgtggtgatgtctttttccattctcatgtcctccaaatcgatgaccgacaaagttctggactacatcacctgcattgggctcagcgtctcaatcctaagcttggttctttgcctgatcattgaagccacagtgtggtcccgggtggttgtgacggagatatcatacatgcgtcacgtgtgcatcgtgaatatagcagtgtcccttctgactgccaatgtgtggtttatcataggctctcactttaacattaaggcccaggactacaacatgtgtgttgcagtgacatttttcagccactttttctacctctctctgtttttctggatgctcttcaaagcattgctcatcatttatggaatattggtcattttccgtaggatgatgaagtcccgaatgatggtcattggctttgccattggctatgggtgcccattgatcattgctgtcactacagttgctatcacagagccagagaacggctacatgagacctgaggcctgttggcttaactgggacaataccaaagcccttttagcatttgccatcccggcgttcgtcattgtggctgtaaatctgattgtggttttggttgttgctgtcaacactcagaggccctctattggcagttccaagtctcaggatgtggtcataattatgaggatcagcaaaaatgttgccatcctcactccactgctgggactgacctggggttttggaatagccactctcatagaaggcacttccttgacgttccatataatttttgccttgctcaatgctttccaggtaagttccaagagggagacttttctgtgttactccgacgctagcaaaggagaagaactcttcactggagttgtcccaattcttgttgaattagatggtgatgttaacggccacaagttctctgtcagtggagagggtgaaggtgatgcaacatacggaaaacttaccctgaagttcatctgcactactggcaaactgcctgttccatggccaacactagtcactactctgtgctatggtgttcaatgcttttcaagatacccggatcatatgaaacggcatgactttttcaagagtgccatgcccgaaggttatgtacaggaaaggaccatcttcttcaaagatgacggcaactacaagacacgtgctgaagtcaagtttgaaggtgatacccttgttaatagaatcgagttaaaaggtattgacttcaaggaagatggcaacattctgggacacaaattggaatacaactataactcacacaatgtatacatcatggcagacaaacaaaagaatggaatcaaagtgaacttcaagacccgccacaacattgaagatggaagcgttcaactagcagaccattatcaacaaaatactccaattggcgatggccctgtccttttaccagacaaccattacctgtccacacaatctgccctttcgaaagatcccaacgaaaagagagaccacatggtccttcttgagtttgtaacagctgctgggattacacatggcatggatgaactgtacaactga

SEQ ID NO: 161 - DNA, 3447 bp, Human
atgaaagttggagtgctgtggctcatttctttcttcaccttcactgacggccacggtggcttcctggggaaaaatgatggcatcaaaacaaaaaaagaactcattgtgaataagaaaaaacatctaggcccagtcgaagaatatcagctgctgcttcaggtgacctatagagattccaaggagaaaagagatttgagaaattttctgaagctcttgaagcctccattattatggtcacatgggctaattagaattatcagagcaaaggctaccacagactgcaacagcctgaatggagtcctgcagtgtacctgtgaagacagctacacctggtttcctccctcatgccttgatccccagaactgctaccttcacacggctggagcactcccaagctgtgaatgtcatctcaacaacctcagccagagtgtcaatttctgtgagagaacaaagatttggggcactttcaaaattaatgaaaggtttacaaatgaccttttgaattcatcttctgctatatactccaaatatgcaaatggaattgaaattcaacttaaaaaagcatatgaaagaattcaaggttttgagtcggttcaggtcacccaatttcgaaatggaagcatcgttgctgggtatgaagttgttggctccagcagtgcatctgaactgctgtcagccattgaacatgttgccgagaaggctaagacagcccttcacaagctgtttccattagaagacggctctttcagagtgttcggaaaagcccagtgtaatgacattgtctttggatttgggtccaaggatgatgaatataccctgccctgcagcagtggctacaggggaaacatcacagccaagtgtgagtcctctgggtggcaggtcatcagggagacttgtgtgctctctctgcttgaagaactgaacaagaatttcagtatgattgtaggcaatgccactgaggcagctgtgtcatccttcgtgcaaaatctttctgtcatcattcggcaaaacccatcaaccacagtggggaatctggcttcggtggtgtcgattctgagcaatatttcatctctgtcactggccagccatttcagggtgtccaattcaacaatggaggatgtcatcagtatagctgacaatatccttaattcagcctcagtaaccaactggacagtcttactgcgggaagaaaagtatgccagctcacggttactagagacattagaaaacatcagcactctggtgcctccgacagctcttcctctgaatttttctcggaaattcattgactggaaagggattccagtgaacaaaagccaactcaaaaggggttacagctatcagattaaaatgtgtccccaaaatacatctattcccatcagaggccgtgtgttaattgggtcagaccaattccagagatcccttccagaaactattatcagcatggcctcgttgactctggggaacattctacccgtttccaaaaatggaaatgctcaggtcaatggacctgtgatatccacggttattcaaaactattccataaatgaagttttcctatttttttccaagatagagtcaaacctgagccagcctcattgtgtgttttgggatttcagtcatttgcagtggaacgatgcaggctgccacctagtgaatgaaactcaagacatcgtgacgtgccaatgtactcacttgacctccttctccatattgatgtcaccttttgtcccctctacaatcttccccgttgtaaaatggatcacctatgtgggactgggtatctccattggaagtctcattttatgcctgatcatcgaggctttgttttggaagcagattaaaaaaagccaaacctctcacacacgtcgtatttgcatggtgaacatagccctgtccctcttgattgctgatgtctggtttattgttggtgccacagtggacaccacggtgaacccttctggagtctgcacagctgctgtgttctttacacacttcttctacctctctttgttcttctggatgctcatgcttggcatcctgctggcttaccggatcatcctcgtgttccatcacatggcccagcatttgatgatggctgttggattttgcctgggttatgggtgccctctcattatatctgtcattaccattgctgtcacgcaacctagcaatacctacaaaaggaaagatgtgtgttggcttaactggtccaatggaagcaaaccactcctggcttttgttgtccctgcactggctattgtggctgtgaacttcgttgtggtgctgctagttctcacaaagctctggaggccgactgttggggaaagactgagtcgggatgacaaggccaccatcatccgcgtggggaagagcctcctcattctgacccctctgctagggctcacctggggctttggaataggaacaatagtggacagccagaatctggcttggcatgttatttttgctttactcaatgcattccagggattttttatcttatgctttggaatactcttggacagtaagctgcgacaacttctgttcaacaagttgtctgccttaagttcttggaagcaaacagaaaagcaaaactcatcagatttatctgccaaacccaaattctcaaagcctttcaacccactgcaaaacaaaggccattatgcattttctcatactggagattcctccgacaacatcatgctaactcagtttgtctcaaatgaagctagcaaaggagaagaactcttcactggagttgtcccaattcttgttgaattagatggtgatgttaacggccacaagttctctgtcagtggagagggtgaaggtgatgcaacatacggaaaacttaccctgaagttcatctgcactactggcaaactgcctgttccatggccaacactagtcactactctgtgctatggtgttcaatgcttttcaagatacccggatcatatgaaacggcatgactttttcaagagtgccatgcccgaaggttatgtacaggaaaggaccatcttcttcaaagatgacggcaactacaagacacgtgctgaagtcaagtttgaaggtgatacccttgttaatagaatcgagttaaaaggtattgacttcaaggaagatggcaacattctgggacacaaattggaatacaactataactcacacaatgtatacatcatggcagacaaacaaaagaatggaatcaaagtgaacttcaagacccgccacaacattgaagatggaagcgttcaactagcagaccattatcaacaaaatactccaattggcgatggccctgtccttttaccagacaaccattacctgtccacacaatctgccctttcgaaagatcccaacgaaaagagagaccacatggtccttcttgagtttgtaacagctgctgggattacacatggcatggatgaactgtacaactga

SEQ ID NO: 162 - DNA, 1929 bp, Human
atgtcagtgaaacccagctgggggcctggcccctcggagggggtcaccgcagtgcctaccagtgaccttggagagatccacaactggaccgagctgcttgacctcttcaaccacactttgtctgagtgccacgtggagctcagccagagcaccaagcgcgtggtcctctttgccctctacctggccatgtttgtggttgggctggtggagaacctcctggtgatatgcgtcaactggcgcggctcaggccgggcagggctgatgaacctctacatcctcaacatggccatcgcggacctgggcattgtcctgtctctgcccgtgtggatgctggaggtcacgctggactacacctggctctggggcagcttctcctgccgcttcactcactacttctactttgtcaacatgtatagcagcatcttcttcctggtgtgcctcagtgtcgaccgctatgctaccctcaccagcgcctccccctcctggcagcgttaccagcaccgagtgcggcgggccatgtgtgcaggcatctgggtcctctcggccatcatcccgctgcctgaggtggtccacatccagctggtggagggccctgagcccatgtgcctcttcatggcaccttttgaaacgtacagcacctgggccctggcggtggccctgtccaccaccatcctgggcttcctgctgcccttccctctcatcacagtcttcaatgtgctgacagcctgccggctgcggcagccaggacaacccaagagccggcgccactgcctgctgctgtgcgcctacgtggccgtctttgtcatgtgctggctgccctatcatgtgaccctgctgctgctcacactgcatgggacccacatctccctccactgccacctggtccacctgctctacttcttctatgatgtcattgactgcttctccatgctgcactgtgtcatcaaccccatcctttacaactttctcagcccacacttccggggccggctcctgaatgctgtagtccattaccttcctaaggaccagaccaaggcgggcacatgcgcctcctcttcctcctgttccacccagcattccatcatcatcaccaagggtgatagccagcctgctgcagcagccccccaccctgagccaagcctgagctttcaggcacaccatttgcttccaaatacttcccccatctctcccactcagcctcttacacccagcgctagcaaaggagaagaactcttcactggagttgtcccaattcttgttgaattagatggtgatgttaacggccacaagttctctgtcagtggagagggtgaaggtgatgcaacatacggaaaacttaccctgaagttcatctgcactactggcaaactgcctgttccatggccaacactagtcactactctgtgctatggtgttcaatgcttttcaagatacccggatcatatgaaacggcatgactttttcaagagtgccatgcccgaaggttatgtacaggaaaggaccatcttcttcaaagatgacggcaactacaagacacgtgctgaagtcaagtttgaaggtgatacccttgttaatagaatcgagttaaaaggtattgacttcaaggaagatggcaacattctgggacacaaattggaatacaactataactcacacaatgtatacatcatggcagacaaacaaaagaatggaatcaaagtgaacttcaagacccgccacaacattgaagatggaagcgttcaactagcagaccattatcaacaaaatactccaattggcgatggccctgtccttttaccagacaaccattacctgtccacacaatctgccctttcgaaagatcccaacgaaaagagagaccacatggtccttcttgagtttgtaacagctgctgggattacacatggcatggatgaactgtacaactga

SEQ ID NO: 163 - DNA, 1962 bp, Human
atggtttttgctcacagaatggataacagcaagccacatttgattattcctacacttctggtgcccctccaaaaccgcagctgcactgaaacagccacacctctgccaagccaatacctgatggaattaagtgaggagcacagttggatgagcaaccaaacagaccttcactatgtgctgaaacccggggaagtggccacagccagcatcttctttgggattctgtggttgttttctatcttcggcaattccctggtttgtttggtcatccataggagtaggaggactcagtctaccaccaactactttgtggtctccatggcatgtgctgaccttctcatcagcgttgccagcacgcctttcgtcctgctccagttcaccactggaaggtggacgctgggtagtgcaacgtgcaaggttgtgcgatattttcaatatctcactccaggtgtccagatctacgttctcctctccatctgcatagaccggttctacaccatcgtctatcctctgagcttcaaggtgtccagagaaaaagccaagaaaatgattgcggcatcgtggatctttgatgcaggctttgtgacccctgtgctctttttctatggctccaactgggacagtcattgtaactatttcctcccctcctcttgggaaggcactgcctacactgtcatccacttcttggtgggctttgtgattccatctgtcctcataattttattttaccaaaaggtcataaaatatatttggagaataggcacagatggccgaacggtgaggaggacaatgaacattgtccctcggacaaaagtgaaaactatcaagatgttcctcattttaaatctgttgtttttgctctcctggctgccttttcatgtagctcagctatggcacccccatgaacaagactataagaaaagttcccttgttttcacagctatcacatggatatcctttagttcttcagcctctaaacctactctgtattcaatttataatgccaattttcggagagggatgaaagagactttttgcatgtcctctatgaaatgttaccgaagcaatgcctatactatcacaacaagttcaaggatggccaaaaaaaactacgttggcatttcagaaatcccttccatggccaaaactattaccaaagactcgatctatgactcatttgacagagaagccaaggaaaaaaagcttgcttggcccattaactcaaatccaccaaatacttttgtcgctagcaaaggagaagaactcttcactggagttgtcccaattcttgttgaattagatggtgatgttaacggccacaagttctctgtcagtggagagggtgaaggtgatgcaacatacggaaaacttaccctgaagttcatctgcactactggcaaactgcctgttccatggccaacactagtcactactctgtgctatggtgttcaatgcttttcaagatacccggatcatatgaaacggcatgactttttcaagagtgccatgcccgaaggttatgtacaggaaaggaccatcttcttcaaagatgacggcaactacaagacacgtgctgaagtcaagtttgaaggtgatacccttgttaatagaatcgagttaaaaggtattgacttcaaggaagatggcaacattctgggacacaaattggaatacaactataactcacacaatgtatacatcatggcagacaaacaaaagaatggaatcaaagtgaacttcaagacccgccacaacattgaagatggaagcgttcaactagcagaccattatcaacaaaatactccaattggcgatggccctgtccttttaccagacaaccattacctgtccacacaatctgccctttcgaaagatcccaacgaaaagagagaccacatggtccttcttgagtttgtaacagctgctgggattacacatggcatggatgaactgtacaactga

SEQ ID NO: 164 - DNA, 1833 bp, Human
atggcctgcaacagcacgtcccttgaggcttacacatacctgctgctgaacaccagcaacgcctcagactcggggtccacccagttgcccgcacccctcaggatctccttggccatagtgatgctgctgatgaccgtggtggggttcctgggcaacactgtggtctgcatcatcgtgtaccagaggccggctatgcgctcggccatcaacctgctgctggccaccctggccttctccgacatcatgctgtccctctgctgcatgcccttcaccgccgtcaccctcatcaccgtgcgctggcactttggggaccacttctgccgcctctcagccacgctctactggttttttgtcctggagggcgtggccatcctgctcatcatcagcgtggaccgcttcctcatcatcgtccagcgccaggacaagctgaacccgcgcagggccaaggtgatcatcgcggtctcctgggtgctgtccttctgcatcgcggggccctcgctcacgggctggacgctggtggaggtgccggcgcgggccccacagtgcgtgctgggctacacggagctccccgctgaccgcgcctacgtggtcaccttggtggtggccgtgttcttcgcgccctttggcgtcatgctgtgcgcctacatgtgcatcctcaacacggtccgcaagaacgccgtgcgcgtgcacaaccagtcggacagcctggacctgcggcagctcaccagggcgggcctgcggcgcctgcagcggcagcaacaggtcagcgtggacttgagcttcaagaccaaggccttcaccaccatcctgatcctcttcgtgggcttctccctctgctggctgccccactccgtctacagcctcctgtctgtgtttagccagcgcttttactgcggttcctccttctacgccaccagcacctgcgtcctgtggctcagttacctcaagtccgtcttcaaccccatcgtctactgctggagaatcaaaaaattccgcgaggcctgcatagagttgctgccccagaccttccaaatcctccccaaagtgcctgagcggatccgaaggagaatccagccaagcacagtctacgtgtgcaatgaaaaccagtctgcggttgctagcaaaggagaagaactcttcactggagttgtcccaattcttgttgaattagatggtgatgttaacggccacaagttctctgtcagtggagagggtgaaggtgatgcaacatacggaaaacttaccctgaagttcatctgcactactggcaaactgcctgttccatggccaacactagtcactactctgtgctatggtgttcaatgcttttcaagatacccggatcatatgaaacggcatgactttttcaagagtgccatgcccgaaggttatgtacaggaaaggaccatcttcttcaaagatgacggcaactacaagacacgtgctgaagtcaagtttgaaggtgatacccttgttaatagaatcgagttaaaaggtattgacttcaaggaagatggcaacattctgggacacaaattggaatacaactataactcacacaatgtatacatcatggcagacaaacaaaagaatggaatcaaagtgaacttcaagacccgccacaacattgaagatggaagcgttcaactagcagaccattatcaacaaaatactccaattggcgatggccctgtccttttaccagacaaccattacctgtccacacaatctgccctttcgaaagatcccaacgaaaagagagaccacatggtccttcttgagtttgtaacagctgctgggattacacatggcatggatgaactgtacaactga

SEQ ID NO: 165 - DNA, 1752 bp, Human
atgtacaaggactgcatcgagtccactggagactattttcttctctgtgacgccgaggggccatggggcatcattctggagtccctggccatacttggcatcgtggtcacaattctgctactcttagcatttctcttcctcatgcgaaagatccaagactgcagccagtggaatgtcctccccacccagctcctcttcctcctgagtgtcctggggctcttcggactcgcttttgccttcatcatcgagctcaatcaacaaactgcccccgtacgctactttctctttggggttctctttgctctctgtttctcatgcctcttagctcatgcctccaatctagtgaagctggttcggggttgtgtctccttctcctggacgacaattctgtgcattgctattggttgcagtctgttgcaaatcattattgccactgagtatgtgactctcatcatgaccagaggtatgatgtttgtgaatatgacaccctgccagctcaatgtggactttgttgtactcctggtctatgtcctcttcctgatggccctcacattcttcgtctccaaagccaccttctgtggcccgtgtgagaactggaagcagcatggaaggctcatctttatcactgtgctcttctccatcatcatctgggtggtgtggatctccatgctcctgagaggcaacccgcagttccagcgacagccccagtgggatgacccggtcgtctgcattgctctggtcaccaacgcatgggttttcctgctgctgtacatcgtccctgagctctgcattctctacagatcgtgtagacaggagtgccctttacaaggcaatgcctgccccgtcacagcctaccaacacagcttccaagtggagaaccaggagctctccagagcccgagacagtgatggagctgaggaggatgtagcattaacttcatatggtactcccattcagccgcagactgttgatcccacacaagagtgtttcatcccacaggctaaactaagcccccagcaagatgcaggaggagtagctagcaaaggagaagaactcttcactggagttgtcccaattcttgttgaattagatggtgatgttaacggccacaagttctctgtcagtggagagggtgaaggtgatgcaacatacggaaaacttaccctgaagttcatctgcactactggcaaactgcctgttccatggccaacactagtcactactctgtgctatggtgttcaatgcttttcaagatacccggatcatatgaaacggcatgactttttcaagagtgccatgcccgaaggttatgtacaggaaaggaccatcttcttcaaagatgacggcaactacaagacacgtgctgaagtcaagtttgaaggtgatacccttgttaatagaatcgagttaaaaggtattgacttcaaggaagatggcaacattctgggacacaaattggaatacaactataactcacacaatgtatacatcatggcagacaaacaaaagaatggaatcaaagtgaacttcaagacccgccacaacattgaagatggaagcgttcaactagcagaccattatcaacaaaatactccaattggcgatggccctgtccttttaccagacaaccattacctgtccacacaatctgccctttcgaaagatcccaacgaaaagagagaccacatggtccttcttgagtttgtaacagctgctgggattacacatggcatggatgaactgtacaactga

SEQ ID NO: 166 - DNA, 3618 bp, Human
atgcccagcccgccggggctccgggcgctatggctttgcgccgcgctgtgcgcttcccggagggccggcggcgccccccagcccggcccggggcccaccgcctgcccggccccctgccactgccaggaggacggcatcatgctgtctgccgactgctctgagctcgggctgtccgccgttccgggggacctggaccccctgacggcttacctggacctcagcatgaacaacctcacagagcttcagcctggcctcttccaccacctgcgcttcttggaggagctgcgtctctctgggaaccatctctcacacatcccaggacaagcattctctggtctctacagcctgaaaatcctgatgctgcagaacaatcagctgggaggaatccccgcagaggcgctgtgggagctgccgagcctgcagtcgctgcgcctagatgccaacctcatctccctggtcccggagaggagctttgaggggctgtcctccctccgccacctctggctggacgacaatgcactcacggagatccctgtcagggccctcaacaacctccctgccctgcaggccatgaccctggccctcaaccgcatcagccacatccccgactacgcgttccagaatctcaccagccttgtggtgctgcatttgcataacaaccgcatccagcatctggggacccacagcttcgaggggctgcacaatctggagacactagacctgaattataacaagctgcaggagttccctgtggccatccggaccctgggcagactgcaggaactggggttccataacaacaacatcaaggccatcccagaaaaggccttcatggggaaccctctgctacagacgatacacttttatgataacccaatccagtttgtgggaagatcggcattccagtacctgcctaaactccacacactatctctgaatggtgccatggacatccaggagtttccagatctcaaaggcaccaccagcctggagatcctgaccctgacccgcgcaggcatccggctgctcccatcggggatgtgccaacagctgcccaggctccgagtcctggaactgtctcacaatcaaattgaggagctgcccagcctgcacaggtgtcagaaattggaggaaatcggcctccaacacaaccgcatctgggaaattggagctgacaccttcagccagctgagctccctgcaagccctggatcttagctggaacgccatccggtccatccaccccgaggccttctccaccctgcactccctggtcaagctggacctgacagacaaccagctgaccacactgcccctggctggacttgggggcttgatgcatctgaagctcaaagggaaccttgctctctcccaggccttctccaaggacagtttcccaaaactgaggatcctggaggtgccttatgcctaccagtgctgtccctatgggatgtgtgccagcttcttcaaggcctctgggcagtgggaggctgaagaccttcaccttgatgatgaggagtcttcaaaaaggcccctgggcctccttgccagacaagcagagaaccactatgaccaggacctggatgagctccagctggagatggaggactcaaagccacaccccagtgtccagtgtagccctactccaggccccttcaagccctgtgagtacctctttgaaagctggggcatccgcctggccgtgtgggccatcgtgttgctctccgtgctctgcaatggactggtgctgctgaccgtgttcgctggcgggcctgtccccctgcccccggtcaagtttgtggtaggtgcgattgcaggcgccaacaccttgactggcatttcctgtggccttctagcctcagtcgatgccctgacctttggtcagttctctgagtacggagcccgctgggagacggggctaggctgccgggccactggcttcctggcagtacttgggtcggaggcatcggtgctgctgctcactctggccgcagtgcagtgcagcgtctccgtctcctgtgtccgggcctatgggaagtccccctccctgggcagcgttcgagcaggggtcctaggctgcctggcactggcagggctggccgccgcgctgcccctggcctcagtgggagaatacggggcctccccactctgcctgccctacgcgccacctgagggtcagccagcagccctgggcttcaccgtggccctggtgatgatgaactccttctgtttcctggtcgtggccggtgcctacatcaaactgtactgtgacctgccgcggggcgactttgaggccgtgtgggactgcgccatggtgaggcacgtggcctggctcatcttcgcagacgggctcctctactgtcccgtggccttcctcagctttgcctccatgctgggcctcttccctgtcacgcccgaggccgtcaagtctgtcctgctggtggtgctgcccctgcctgcctgcctcaacccactgctgtacctgctcttcaacccccacttccgggatgaccttcggcggcttcggccccgcgcaggggactcagggcccctagcctatgctgcggccggggagctggagaagagctcctgtgattctacccaggccctggtagccttctctgatgtggatctcattctggaagcttctgaagctgggcggccccctgggctggagacctatggcttcccctcagtgaccctcatctcctgtcagcagccaggggcccccaggctggagggcagccattgtgtagagccagaggggaaccactttgggaacccccaaccctccatggatggagaactgctgctgagggcagagggatctacgccagcaggtggaggcttgtcagggggtggcggctttcagccctctggcttggcctttgcttcacacgtggctagcaaaggagaagaactcttcactggagttgtcccaattcttgttgaattagatggtgatgttaacggccacaagttctctgtcagtggagagggtgaaggtgatgcaacatacggaaaacttaccctgaagttcatctgcactactggcaaactgcctgttccatggccaacactagtcactactctgtgctatggtgttcaatgcttttcaagatacccggatcatatgaaacggcatgactttttcaagagtgccatgcccgaaggttatgtacaggaaaggaccatcttcttcaaagatgacggcaactacaagacacgtgctgaagtcaagtttgaaggtgatacccttgttaatagaatcgagttaaaaggtattgacttcaaggaagatggcaacattctgggacacaaattggaatacaactataactcacacaatgtatacatcatggcagacaaacaaaagaatggaatcaaagtgaacttcaagacccgccacaacattgaagatggaagcgttcaactagcagaccattatcaacaaaatactccaattggcgatggccctgtccttttaccagacaaccattacctgtccacacaatctgccctttcgaaagatcccaacgaaaagagagaccacatggtccttcttgagtttgtaacagctgctgggattacacatggcatggatgaactgtacaactga

SEQ ID NO: 167 - DNA, 1722 bp, Human
atggaatcatctttctcatttggagtgatccttgctgtcctggcctccctcatcattgctactaacacactagtggctgtggctgtgctgctgttgatccacaagaatgatggtgtcagtctctgcttcaccttgaatctggctgtggctgacaccttgattggtgtggccatctctggcctactcacagaccagctctccagcccttctcggcccacacagaagaccctgtgcagcctgcggatggcatttgtcacttcctccgcagctgcctctgtcctcacggtcatgctgatcacctttgacaggtaccttgccatcaagcagcccttccgctacttgaagatcatgagtgggttcgtggccggggcctgcattgccgggctgtggttagtgtcttacctcattggcttcctcccactcggaatccccatgttccagcagactgcctacaaagggcagtgcagcttctttgctgtatttcaccctcacttcgtgctgaccctctcctgcgttggcttcttcccagccatgctcctctttgtcttcttctactgcgacatgctcaagattgcctccatgcacagccagcagattcgaaagatggaacatgcaggagccatggctggaggttatcgatccccacggactcccagcgacttcaaagctctccgtactgtgtctgttctcattgggagctttgctctatcctggacccccttccttatcactggcattgtgcaggtggcctgccaggagtgtcacctctacctagtgctggaacggtacctgtggctgctcggcgtgggcaactccctgctcaacccactcatctatgcctattggcagaaggaggtgcgactgcagctctaccacatggccctaggagtgaagaaggtgctcacctcattcctcctctttctctcggccaggaattgtggcccagagaggcccagggaaagttcctgtcacatcgtcactatctccagctcagagtttgatggcgctagcaaaggagaagaactcttcactggagttgtcccaattcttgttgaattagatggtgatgttaacggccacaagttctctgtcagtggagagggtgaaggtgatgcaacatacggaaaacttaccctgaagttcatctgcactactggcaaactgcctgttccatggccaacactagtcactactctgtgctatggtgttcaatgcttttcaagatacccggatcatatgaaacggcatgactttttcaagagtgccatgcccgaaggttatgtacaggaaaggaccatcttcttcaaagatgacggcaactacaagacacgtgctgaagtcaagtttgaaggtgatacccttgttaatagaatcgagttaaaaggtattgacttcaaggaagatggcaacattctgggacacaaattggaatacaactataactcacacaatgtatacatcatggcagacaaacaaaagaatggaatcaaagtgaacttcaagacccgccacaacattgaagatggaagcgttcaactagcagaccattatcaacaaaatactccaattggcgatggccctgtccttttaccagacaaccattacctgtccacacaatctgccctttcgaaagatcccaacgaaaagagagaccacatggtccttcttgagtttgtaacagctgctgggattacacatggcatggatgaactgtacaactga

SEQ ID NO: 168 - DNA, 1839 bp, Human
atgctgacagggagctgcggggaccctcagaaaaagccacaggtgacccaggactcagggccccagagcatggggcttgagggacgagagacagctggccagccacgagtgaccctgctgcccacgcccaacgtcagcgggctgagccaggagtttgaaagccactggccagagatcgcagagaggtccccgtgtgtggctggcgtcatccctgtcatctactacagtgtcctgctgggcttggggctgcctgtcagcctcctgaccgcagtggccctggcgcgccttgccaccaggaccaggaggccctcctactactaccttctggcgctcacagcctcggatatcatcatccaggtggtcatcgtgttcgcgggcttcctcctgcagggagcagtgctggcccgccaggtgccccaggctgtggtgcgcacggccaacatcctggagtttgctgccaaccacgcctcagtctggatcgccatcctgctcacggttgaccgctacactgccctgtgccaccccctgcaccatcgggccgcctcgtccccaggccggacccgccgggccattgctgctgtcctgagtgctgccctgttgaccggcatccccttctactggtggctggacatgtggagagacaccgactcacccagaacactggacgaggtcctcaagtgggctcactgtctcactgtctatttcatcccttgtggcgtgttcctggtcaccaactcggccatcatccaccggctacggaggaggggccggagtgggctgcagccccgggtgggcaagagcacagccatcctcctgggcatcaccacactgttcaccctcctgtgggcgccccgggtcttcgtcatgctctaccacatgtacgtggcccctgtccaccgggactggagggtccacctggccttggatgtggccaatatggtggccatgctccacacggcagccaacttcggcctctactgctttgtcagcaagactttccgggccactgtccgacaggtcatccacgatgcctacctgccctgcactttggcatcacagccagagggcatggcggcgaagcctgtgatggagcctccgggactccccacaggggcagaagtggctagcaaaggagaagaactcttcactggagttgtcccaattcttgttgaattagatggtgatgttaacggccacaagttctctgtcagtggagagggtgaaggtgatgcaacatacggaaaacttaccctgaagttcatctgcactactggcaaactgcctgttccatggccaacactagtcactactctgtgctatggtgttcaatgcttttcaagatacccggatcatatgaaacggcatgactttttcaagagtgccatgcccgaaggttatgtacaggaaaggaccatcttcttcaaagatgacggcaactacaagacacgtgctgaagtcaagtttgaaggtgatacccttgttaatagaatcgagttaaaaggtattgacttcaaggaagatggcaacattctgggacacaaattggaatacaactataactcacacaatgtatacatcatggcagacaaacaaaagaatggaatcaaagtgaacttcaagacccgccacaacattgaagatggaagcgttcaactagcagaccattatcaacaaaatactccaattggcgatggccctgtccttttaccagacaaccattacctgtccacacaatctgccctttcgaaagatcccaacgaaaagagagaccacatggtccttcttgagtttgtaacagctgctgggattacacatggcatggatgaactgtacaactga

SEQ ID NO: 169 - DNA, 1836 bp, Human
atggacaccctggaggaggtgacttgggccaatgggagcacagcgctacccccacccctggcaccaaacatcagtgtgcctcatcgctgcctgctgctgctctacgaagacattggcacctccagggtccggtactgggacctcttgctgctcatccccaatgtgctcttcctcatcttcctgctctggaagcttccatctgctcgggcgaagatccgcatcacctccagccccatttttatcaccttctacatcctggtgtttgtggtggcgctggtgggcattgcccgggccgtggtatccatgacggtgagcacctcgaacgctgcaactgttgctgataagatcctgtgggagatcacccgcttcttcctgctggccatcgagctgagtgtgatcatcctgggcctggcctttggccacctggagagtaagtccagcatcaagcgggtgctggccatcaccacagtgctgtccctggcctactctgtcacccaggggaccctggagatcctgtaccctgatgcccatctctcagctgaggactttaatatctatggccatgggggccgccagttctggctggtcagctcctgcttcttcttcctggtctactctctggtggtcatccttcccaagaccccgctgaaggagcgcatctccctgccttctcggaggagcttctacgtgtatgcgggcatcctggcactgctcaacctactgcaggggctggggagtgtgctgctgtgcttcgacatcatcgaggggctctgctgtgtagatgccacaaccttcctgtacttcagcttcttcgctccgctcatctacgtggctttcctccggggcttcttcggctcggagcccaagatcctcttctcctacaaatgccaagtggacgagacagaggagccagatgtacacctaccccagccctacgctgtggcccggcgggagggcctggaggctgcaggggctgctggggcctcagctgccagctactcgagcacgcagttcgactctgccggcggggtggcctacctggatgacatcgcttccatgccctgccacactggcagcatcaacagcacagacagcgagcgctggaaggccatcaatgccgctagcaaaggagaagaactcttcactggagttgtcccaattcttgttgaattagatggtgatgttaacggccacaagttctctgtcagtggagagggtgaaggtgatgcaacatacggaaaacttaccctgaagttcatctgcactactggcaaactgcctgttccatggccaacactagtcactactctgtgctatggtgttcaatgcttttcaagatacccggatcatatgaaacggcatgactttttcaagagtgccatgcccgaaggttatgtacaggaaaggaccatcttcttcaaagatgacggcaactacaagacacgtgctgaagtcaagtttgaaggtgatacccttgttaatagaatcgagttaaaaggtattgacttcaaggaagatggcaacattctgggacacaaattggaatacaactataactcacacaatgtatacatcatggcagacaaacaaaagaatggaatcaaagtgaacttcaagacccgccacaacattgaagatggaagcgttcaactagcagaccattatcaacaaaatactccaattggcgatggccctgtccttttaccagacaaccattacctgtccacacaatctgccctttcgaaagatcccaacgaaaagagagaccacatggtccttcttgagtttgtaacagctgctgggattacacatggcatggatgaactgtacaactga

SEQ ID NO: 170 - DNA, 2016 bp, Human
atgtgtttttctcccattctggaaatcaacatgcagtctgaatctaacattacagtgcgagatgacattgatgacatcaacaccaatatgtaccaaccactatcatatccgttaagctttcaagtgtctctcaccggatttcttatgttagaaattgtgttgggacttggcagcaacctcactgtattggtactttactgcatgaaatccaacttaatcaactctgtcagtaacattattacaatgaatcttcatgtacttgatgtaataatttgtgtgggatgtattcctctaactatagttatccttctgctttcactggagagtaacactgctctcatttgctgtttccatgaggcttgtgtatcttttgcaagtgtctcaacagcaatcaacgtttttgctatcactttggacagatatgacatctctgtaaaacctgcaaaccgaattctgacaatgggcagagctgtaatgttaatgatatccatttggattttttcttttttctctttcctgattccttttattgaggtaaattttttcagtcttcaaagtggaaatacctgggaaaacaagacacttttatgtgtcagtacaaatgaatactacactgaactgggaatgtattatcacctgttagtacagatcccaatattctttttcactgttgtagtaatgttaatcacatacaccaaaatacttcaggctcttaatattcgaataggcacaagattttcaacagggcagaagaagaaagcaagaaagaaaaagacaatttctctaaccacacaacatgaggctacagacatgtcacaaagcagtggtgggagaaatgtagtctttggtgtaagaacttcagtttctgtaataattgccctccggcgagctgtgaaacgacaccgtgaacgacgagaaagacaaaagagagtcttcaggatgtctttattgattatttctacatttcttctctgctggacaccaatttctgttttaaataccaccattttatgtttaggcccaagtgaccttttagtaaaattaagattgtgttttttagtcatggcttatggaacaactatatttcaccctctattatatgcattcactagacaaaaatttcaaaaggtcttgaaaagtaaaatgaaaaagcgagttgtttctatagtagaagctgatcccctgcctaataatgctgtaatacacaactcttggatagatcctaaaagaaacaaaaaaattacctttgaagatagtgaaataagagaaaaatgtttagtgcctcaggttgtcacagacgctagcaaaggagaagaactcttcactggagttgtcccaattcttgttgaattagatggtgatgttaacggccacaagttctctgtcagtggagagggtgaaggtgatgcaacatacggaaaacttaccctgaagttcatctgcactactggcaaactgcctgttccatggccaacactagtcactactctgtgctatggtgttcaatgcttttcaagatacccggatcatatgaaacggcatgactttttcaagagtgccatgcccgaaggttatgtacaggaaaggaccatcttcttcaaagatgacggcaactacaagacacgtgctgaagtcaagtttgaaggtgatacccttgttaatagaatcgagttaaaaggtattgacttcaaggaagatggcaacattctgggacacaaattggaatacaactataactcacacaatgtatacatcatggcagacaaacaaaagaatggaatcaaagtgaacttcaagacccgccacaacattgaagatggaagcgttcaactagcagaccattatcaacaaaatactccaattggcgatggccctgtccttttaccagacaaccattacctgtccacacaatctgccctttcgaaagatcccaacgaaaagagagaccacatggtccttcttgagtttgtaacagctgctgggattacacatggcatggatgaactgtacaactga

SEQ ID NO: 171 - DNA, 1800 bp, Human
atgaatgaatccaggtggactgaatggaggatcctgaacatgagcagtggcattgtgaatgtgtccgagcgtcactcctgcccacttggatttggccactacagtgtggtggatgtctgcatcttcgagacagtggttattgtgttgctgacatttctgatcattgctgggaatctaacagttatctttgtctttcattgtgctccactgttacatcattatactaccagctatttcattcagacgatggcatatgctgatcttttcgttggagttagctgcttggttcctactctgtcacttctccactactccacaggtgtccacgagtcattgacttgccaggtttttggatatatcatctcagttctaaaaagtgtttctatggcatgtcttgcttgcatcagtgtggatcgttatcttgcaataaccaagcctctttcctacaatcaactggtcaccccttgtcgcttgagaatttgcattattttgatctggatctactcctgcctaattttcttgccttccttttttggctgggggaaacctggttaccatggtgacatttttgaatggtgtgccacgtcttggctcaccagtgcctattttactggctttattgtttgtttactttatgctcctgctgcctttgttgtctgcttcacttacttccacattttcaaaatttgccgtcagcacaccaaagagataaatgaccgaagagcccgattccctagtcatgaggtagattcttccagagagactggacacagccctgaccgtcgctacgccatggttttgtttaggataaccagtgtattttatatgctgtggctcccctatataatttactttcttctagaaagctcccgggtcttggacaatccaactctgtccttcttaacaacctggcttgcaataagtaatagtttttgtaactgtgtaatatacagcctctccaacagcgttttccggctaggcctccgaagactgtctgagacaatgtgcacatcctgtatgtgtgtgaaggatcaggaagcacaagaacccaaacctaggaaacgggctaattcttgctccattgctagcaaaggagaagaactcttcactggagttgtcccaattcttgttgaattagatggtgatgttaacggccacaagttctctgtcagtggagagggtgaaggtgatgcaacatacggaaaacttaccctgaagttcatctgcactactggcaaactgcctgttccatggccaacactagtcactactctgtgctatggtgttcaatgcttttcaagatacccggatcatatgaaacggcatgactttttcaagagtgccatgcccgaaggttatgtacaggaaaggaccatcttcttcaaagatgacggcaactacaagacacgtgctgaagtcaagtttgaaggtgatacccttgttaatagaatcgagttaaaaggtattgacttcaaggaagatggcaacattctgggacacaaattggaatacaactataactcacacaatgtatacatcatggcagacaaacaaaagaatggaatcaaagtgaacttcaagacccgccacaacattgaagatggaagcgttcaactagcagaccattatcaacaaaatactccaattggcgatggccctgtccttttaccagacaaccattacctgtccacacaatctgccctttcgaaagatcccaacgaaaagagagaccacatggtccttcttgagtttgtaacagctgctgggattacacatggcatggatgaactgtacaactga

SEQ ID NO: 172 - DNA, 1728 bp, Human
atgaactcgtgggacgcgggcctggcggggctactggtgggcacgatgggcgtctcgctgctgtccaacgcgctggtgctgctctgcctgctgcacagcgcggacatccgccgccaggcgccggcgctcttcaccctgaacctcacgtgcgggaacttgctgtgcaccgtggtcaacatgccgctcacgctggccggcgtcgtggcgcagcggcagccggcgggcgaccgcctgtgccgcctggctgccttcctcgacaccttcctggctgccaactccatgctcagcatggccgcgctcagcatcgaccgctgggtggccgtggtcttcccgctgagctaccgggccaagatgcgcctccgcgacgcggcgctcatggtggcctacacgtggctgcacgcgctcaccttcccagccgccgcgctcgccctgtcctggctcggcttccaccagctgtacgcctcgtgcacgctgtgcagccggcggccggacgagcgcctgcgcttcgccgtcttcactggcgccttccacgctctcagcttcctgctctccttcgtcgtgctctgctgcacgtacctcaaggtgctcaaggtggcccgcttccattgcaagcgcatcgacgtgatcaccatgcagacgctcgtgctgctggtggacctgcaccccagtgtgcgggaacgctgtctggaggagcagaagcggaggcgacagcgagccaccaagaagatcagcaccttcatagggaccttccttgtgtgcttcgcgccctatgtgatcaccaggctagtggagctcttctccacggtgcccatcggctcccactggggggtgctgtccaagtgcttggcgtacagcaaggccgcatccgacccctttgtgtactccttactgcgacaccagtaccgcaaaagctgcaaggagattctgaacaggctcctgcacagacgctccatccactcctctggcctcacaggcgactctcacagccagaacattctgccggtgtctgaggctagcaaaggagaagaactcttcactggagttgtcccaattcttgttgaattagatggtgatgttaacggccacaagttctctgtcagtggagagggtgaaggtgatgcaacatacggaaaacttaccctgaagttcatctgcactactggcaaactgcctgttccatggccaacactagtcactactctgtgctatggtgttcaatgcttttcaagatacccggatcatatgaaacggcatgactttttcaagagtgccatgcccgaaggttatgtacaggaaaggaccatcttcttcaaagatgacggcaactacaagacacgtgctgaagtcaagtttgaaggtgatacccttgttaatagaatcgagttaaaaggtattgacttcaaggaagatggcaacattctgggacacaaattggaatacaactataactcacacaatgtatacatcatggcagacaaacaaaagaatggaatcaaagtgaacttcaagacccgccacaacattgaagatggaagcgttcaactagcagaccattatcaacaaaatactccaattggcgatggccctgtccttttaccagacaaccattacctgtccacacaatctgccctttcgaaagatcccaacgaaaagagagaccacatggtccttcttgagtttgtaacagctgctgggattacacatggcatggatgaactgtacaactga

SEQ ID NO: 173 - DNA, 2184 bp, Human
atgaaccctccttcggggccaagagtcctgcccagcccaacccaagagcccagctgcatggccaccccagcaccacccagctggtgggacagctcccagagcagcatctccagcctgggccggcttccatccatcagtcccacagcacctgggacttgggctgctgcctgggtccccctccccacggttgatgttccggaccatgcccactataccctgggcacagtgatcttgctggtgggactcacggggatgctgggcaacctgacggtcatctataccttctgcagagctgtgcttcgtggagtcactgtgatgatgcagagcagaagcctccggacacctgccaacatgttcattatcaacctcgcggtcagcgacttcctcatgtccttcacccaggcccctgtcttcttcaccagtagcctctataagcagtggctctttggggagacaggctgcgagttctatgccttctgtggagctctctttggcatttcctccatgatcaccctgacggccatcgccctggaccgctacctggtaatcacacgcccgctggccacctttggtgtggcgtccaagaggcgtgcggcatttgtcctgctgggcgtttggctctatgccctggcctggagtctgccacccttcttcggctggagcgcctacgtgcccgaggggttgctgacatcctgctcctgggactacatgagcttcacgccggccgtgcgtgcctacaccatgcttctctgctgcttcgtgttcttcctccctctgcttatcatcatctactgctacatcttcatcttcagggccatccgggagacaggacgggctctccagaccttcggggcctgcaagggcaatggcgagtccctgtggcagcggcagcggctgcagagcgagtgcaagatggccaagatcatgctgctggtcatcctcctcttcgtgctctcctgggctccctattccgctgtggccctggtggcctttgctgggtacgcacacgtcctgacaccctacatgagctcggtgccagccgtcatcgccaaggcctctgcaatccacaaccccatcatttacgccatcacccaccccaagtacagggtggccattgcccagcacctgccctgcctgggggtgctgctgggtgtatcacgccggcacagtcgcccctaccccagctaccgctccacccaccgctccacgctgatcagccacacctccaacctcagctggatctccatacggaggcgccaggagtccctgggctcggagagtgaggtgggctggacacacatggaggcagcagctgtgtggggagctgcccagcaagcaaatgggcggtccctctacggtcagggtctggaggacttggaagccaaggcaccccccagaccccagggacacgaagcagagactccagggaagaccaaggggctgatccccagccaggaccccaggatggctagcaaaggagaagaactcttcactggagttgtcccaattcttgttgaattagatggtgatgttaacggccacaagttctctgtcagtggagagggtgaaggtgatgcaacatacggaaaacttaccctgaagttcatctgcactactggcaaactgcctgttccatggccaacactagtcactactctgtgctatggtgttcaatgcttttcaagatacccggatcatatgaaacggcatgactttttcaagagtgccatgcccgaaggttatgtacaggaaaggaccatcttcttcaaagatgacggcaactacaagacacgtgctgaagtcaagtttgaaggtgatacccttgttaatagaatcgagttaaaaggtattgacttcaaggaagatggcaacattctgggacacaaattggaatacaactataactcacacaatgtatacatcatggcagacaaacaaaagaatggaatcaaagtgaacttcaagacccgccacaacattgaagatggaagcgttcaactagcagaccattatcaacaaaatactccaattggcgatggccctgtccttttaccagacaaccattacctgtccacacaatctgccctttcgaaagatcccaacgaaaagagagaccacatggtccttcttgagtttgtaacagctgctgggattacacatggcatggatgaactgtacaactga

SEQ ID NO: 174 - DNA, 1851 bp, Human
atggtctgggggaaaatttgctggttcagccagagggctggatggacagtgtttgctgagtcacagatatctctctcatgtagcctttgtctccacagtggtgaccaggaggcacagaacccaaacctggtatctcagctctgtggcgtctttcttcaaaatgagacgaatgaaaccatacatatgcagatgagcatggcagtgggacagcaggccctgcccttgaatatcattgcccccaaggctgtgctggtctccctctgtggggtcttattgaatggcactgtcttctggctgctttgctgtggggccacgaatccctacatggtatacatcctccacctggtcgctgctgacgtgatctatctttgctgctcggcagtggggttcttacaggtgactctgctaacttatcatggagtcgtgttttttatccctgatttcctggccatattgtctcccttctcctttgaggtgtgtctctgtctcctggtggccatcagcacagagcggtgtgtgtgtgtcctcttccccatctggtacagatgccaccgcccaaaatacacatctaatgttgtctgcaccctcatctggggcctgcctttttgcatcaacatagtaaaatcacttttcctaacttactggaaacatgtaaaggcatgtgtcatatttctaaagctttctgggctcttccatgctatcctttcacttgtgatgtgtgtgtcgagtctgactctactcattagattcctgtgctgctcccagcagcaaaaggccaccagggtctatgcggtggtgcagatctcggcccccatgttcctactctgggccctacccctgagcgtggcacccctcataacagatttcaaaatgtttgtcaccacctcctatttaatttccttgttcctcattataaacagcagcgccaaccctatcatttatttctttgtggggagcctcagaaagaaaaggctgaaggaatctctcagagtgattctccaacgggcgttagcagataagccagaggtggggaggaacaaaaaggcagctggcatcgacccaatggagcaaccacactctactcagcatgtggagaaccttcttcccagggagcacagggtcgatgtggaaacagctagcaaaggagaagaactcttcactggagttgtcccaattcttgttgaattagatggtgatgttaacggccacaagttctctgtcagtggagagggtgaaggtgatgcaacatacggaaaacttaccctgaagttcatctgcactactggcaaactgcctgttccatggccaacactagtcactactctgtgctatggtgttcaatgcttttcaagatacccggatcatatgaaacggcatgactttttcaagagtgccatgcccgaaggttatgtacaggaaaggaccatcttcttcaaagatgacggcaactacaagacacgtgctgaagtcaagtttgaaggtgatacccttgttaatagaatcgagttaaaaggtattgacttcaaggaagatggcaacattctgggacacaaattggaatacaactataactcacacaatgtatacatcatggcagacaaacaaaagaatggaatcaaagtgaacttcaagacccgccacaacattgaagatggaagcgttcaactagcagaccattatcaacaaaatactccaattggcgatggccctgtccttttaccagacaaccattacctgtccacacaatctgccctttcgaaagatcccaacgaaaagagagaccacatggtccttcttgagtttgtaacagctgctgggattacacatggcatggatgaactgtacaactga

SEQ ID NO: 175 - DNA, 1827 bp, Human
atggcgaactatagccatgcagctgacaacattttgcaaaatctctcgcctctaacagcctttctgaaactgacttccttgggtttcataataggagtcagcgtggtgggcaacctcctgatctccattttgctagtgaaagataagaccttgcatagagcaccttactacttcctgttggatctttgctgttcagatatcctcagatctgcaatttgtttcccatttgtgttcaactctgtcaaaaatggctctacctggacttatgggactctgacttgcaaagtgattgcctttctgggggttttgtcctgtttccacactgctttcatgctcttctgcatcagtgtcaccagatacttagctatcgcccatcaccgcttctatacaaagaggctgaccttttggacgtgtctggctgtgatctgtatggtgtggactctgtctgtggccatggcatttcccccggttttagacgtgggcacttactcattcattagggaggaagatcaatgcaccttccaacaccgctccttcagggctaatgattccttaggatttatgctgcttcttgctctcatcctcctagccacacagcttgtctacctcaagctgatatttttcgtccacgatcgaagaaaaatgaagccagtccagtttgtagcagcagtcagccagaactggacttttcatggtcctggagccagtggccaggcagctgccaattggctagcaggatttggaaggggtcccacaccacccaccttgctgggcatcaggcaaaatgcaaacaccacaggcagaagaaggctattggtcttagacgagttcaaaatggagaaaagaatcagcagaatgttctatataatgacttttctgtttctaaccttgtggggcccctacctggtggcctgttattggagagtttttgcaagagggcctgtagtaccagggggatttctaacagctgctgtctggatgagttttgcccaagcaggaatcaatccttttgtctgcattttctcaaacagggagctgaggcgctgtttcagcacaacccttctttactgcagaaaatccaggttaccaagggaaccttactgtgttatatctagaaaaggagaagaactcttcactggagttgtcccaattcttgttgaattagatggtgatgttaacggccacaagttctctgtcagtggagagggtgaaggtgatgcaacatacggaaaacttaccctgaagttcatctgcactactggcaaactgcctgttccatggccaacactagtcactactctgtgctatggtgttcaatgcttttcaagatacccggatcatatgaaacggcatgactttttcaagagtgccatgcccgaaggttatgtacaggaaaggaccatcttcttcaaagatgacggcaactacaagacacgtgctgaagtcaagtttgaaggtgatacccttgttaatagaatcgagttaaaaggtattgacttcaaggaagatggcaacattctgggacacaaattggaatacaactataactcacacaatgtatacatcatggcagacaaacaaaagaatggaatcaaagtgaacttcaagacccgccacaacattgaagatggaagcgttcaactagcagaccattatcaacaaaatactccaattggcgatggccctgtccttttaccagacaaccattacctgtccacacaatctgccctttcgaaagatcccaacgaaaagagagaccacatggtccttcttgagtttgtaacagctgctgggattacacatggcatggatgaactgtacaactga

SEQ ID NO: 176 - DNA, 1719 bp, Human
atgaatgaagacctgaaggtcaatttaagcgggctgcctcgggattatttagatgccgctgctgcggagaacatctcggctgctgtctcctcccgggttcctgccgtagagccagagcctgagctcgtagtcaacccctgggacattgtcttgtgtacctcgggaaccctcatctcctgtgaaaatgccattgtggtccttatcatcttccacaaccccagcctgcgagcacccatgttcctgctaataggcagcctggctcttgcagacctgctggccggcattggactcatcaccaattttgtttttgcctacctgcttcagtcagaagccaccaagctggtcacgatcggcctcattgtcgcctctttctctgcctctgtctgcagcttgctggctatcactgttgaccgctacctctcactgtactacgctctgacgtaccattcggagaggacggtcacgtttacctatgtcatgctcgtcatgctctgggggacctccatctgcctggggctgctgcccgtcatgggctggaactgcctccgagacgagtccacctgcagcgtggtcagaccgctcaccaagaacaacgcggccatcctctcggtgtccttcctcttcatgtttgcgctcatgcttcagctctacatccagatctgtaagattgtgatgaggcacgcccatcagatagccctgcagcaccacttcctggccacgtcgcactatgtgaccacccggaaaggggtctccaccctggctatcatcctggggacgtttgctgcttgctggatgcctttcaccctctattccttgatagcggattacacctacccctccatctatacctacgccaccctcctgcccgccacctacaattccatcatcaaccctgtcatatatgctttcagaaaccaagagatccagaaagcgctctgtctcatttgctgcggctgcatcccgtccagtctcgcccagagagcgcgctcgcccagtgatgtggctagcaaaggagaagaactcttcactggagttgtcccaattcttgttgaattagatggtgatgttaacggccacaagttctctgtcagtggagagggtgaaggtgatgcaacatacggaaaacttaccctgaagttcatctgcactactggcaaactgcctgttccatggccaacactagtcactactctgtgctatggtgttcaatgcttttcaagatacccggatcatatgaaacggcatgactttttcaagagtgccatgcccgaaggttatgtacaggaaaggaccatcttcttcaaagatgacggcaactacaagacacgtgctgaagtcaagtttgaaggtgatacccttgttaatagaatcgagttaaaaggtattgacttcaaggaagatggcaacattctgggacacaaattggaatacaactataactcacacaatgtatacatcatggcagacaaacaaaagaatggaatcaaagtgaacttcaagacccgccacaacattgaagatggaagcgttcaactagcagaccattatcaacaaaatactccaattggcgatggccctgtccttttaccagacaaccattacctgtccacacaatctgccctttcgaaagatcccaacgaaaagagagaccacatggtccttcttgagtttgtaacagctgctgggattacacatggcatggatgaactgtacaactga

SEQ ID NO: 177 - DNA, 1842 bp, Human
atggatgtgacttcccaagcccggggcgtgggcctggagatgtacctaggcaccgcgcagcctgcggcccccaacaccacctcccccgagctcaacctgtcccacccgctcctgggcaccgccctggccaatgggacaggtgagctctcggagcaccagcagtacgtgatcggcctgttcctctcgtgcctctacaccatcttcctcttccccatcggctttgtgggcaacatcctgatcctggtggtgaacatcagcttccgcgagaagatgaccatccccgacctgtacttcatcaacctggcggtggcggacctcatcctggtggccgactccctcattgaggtgttcaacctgcacgagcggtactacgacatcgccgtcctgtgcaccttcatgtcgctcttcctgcaggtcaacatgtacagcagcgtcttcttcctcacctggatgagcttcgaccgctacatcgccctggccagggccatgcgctgcagcctgttccgcaccaagcaccacgcccggctgagctgtggcctcatctggatggcatccgtgtcagccacgctggtgcccttcaccgccgtgcacctgcagcacaccgacgaggcctgcttctgtttcgcggatgtccgggaggtgcagtggctcgaggtcacgctgggcttcatcgtgcccttcgccatcatcggcctgtgctactccctcattgtccgggtgctggtcagggcgcaccggcaccgtgggctgcggccccggcggcagaaggcgctccgcatgatcctcgcggtggtgctggtcttcttcgtctgctggctgccggagaacgtcttcatcagcgtgcacctcctgcagcggacgcagcctggggccgctccctgcaagcagtctttccgccatgcccaccccctcacgggccacattgtcaacctcgccgccttctccaacagctgcctaaaccccctcatctacagctttctcggggagaccttcagggacaagctgaggctgtacattgagcagaaaacaaatttgccggccctgaaccgcttctgtcacgctgccctgaaggccgtcattccagacagcactgagcagtcggatgtgaggttcagcagtgccgtggctagcaaaggagaagaactcttcactggagttgtcccaattcttgttgaattagatggtgatgttaacggccacaagttctctgtcagtggagagggtgaaggtgatgcaacatacggaaaacttaccctgaagttcatctgcactactggcaaactgcctgttccatggccaacactagtcactactctgtgctatggtgttcaatgcttttcaagatacccggatcatatgaaacggcatgactttttcaagagtgccatgcccgaaggttatgtacaggaaaggaccatcttcttcaaagatgacggcaactacaagacacgtgctgaagtcaagtttgaaggtgatacccttgttaatagaatcgagttaaaaggtattgacttcaaggaagatggcaacattctgggacacaaattggaatacaactataactcacacaatgtatacatcatggcagacaaacaaaagaatggaatcaaagtgaacttcaagacccgccacaacattgaagatggaagcgttcaactagcagaccattatcaacaaaatactccaattggcgatggccctgtccttttaccagacaaccattacctgtccacacaatctgccctttcgaaagatcccaacgaaaagagagaccacatggtccttcttgagtttgtaacagctgctgggattacacatggcatggatgaactgtacaactga

SEQ ID NO: 178 - DNA, 1725 bp, Human
atgaacaacaatacaacatgtattcaaccatctatgatctcttccatggctttaccaatcatttacatcctcctttgtattgttggtgtttttggaaacactctctctcaatggatatttttaacaaaaataggtaaaaaaacatcaacgcacatctacctgtcacaccttgtgactgcaaacttacttgtgtgcagtgccatgcctttcatgagtatctatttcctgaaaggtttccaatgggaatatcaatctgctcaatgcagagtggtcaattttctgggaactctatccatgcatgcaagtatgtttgtcagtctcttaattttaagttggattgccataagccgctatgctaccttaatgcaaaaggattcctcgcaagagactacttcatgctatgagaaaatattttatggccatttactgaaaaaatttcgccagcccaactttgctagaaaactatgcatttacatatggggagttgtactgggcataatcattccagttaccgtatactactcagtcatagaggctacagaaggagaagagagcctatgctacaatcggcagatggaactaggagccatgatctctcagattgcaggtctcattggaaccacatttattggattttcctttttagtagtactaacatcatactactcttttgtaagccatctgagaaaaataagaacctgtacgtccattatggagaaagatttgacttacagttctgtgaaaagacatcttttggtcatccagattctactaatagtttgcttccttccttatagtatttttaaacccattttttatgttctacaccaaagagataactgtcagcaattgaattatttaatagaaacaaaaaacattctcacctgtcttgcttcggccagaagtagcacagaccccattatatttcttttattagacaaaacattcaagaagacactatataatctctttacaaagtctaattcagcacatatgcaatcatatggtgctagcaaaggagaagaactcttcactggagttgtcccaattcttgttgaattagatggtgatgttaacggccacaagttctctgtcagtggagagggtgaaggtgatgcaacatacggaaaacttaccctgaagttcatctgcactactggcaaactgcctgttccatggccaacactagtcactactctgtgctatggtgttcaatgcttttcaagatacccggatcatatgaaacggcatgactttttcaagagtgccatgcccgaaggttatgtacaggaaaggaccatcttcttcaaagatgacggcaactacaagacacgtgctgaagtcaagtttgaaggtgatacccttgttaatagaatcgagttaaaaggtattgacttcaaggaagatggcaacattctgggacacaaattggaatacaactataactcacacaatgtatacatcatggcagacaaacaaaagaatggaatcaaagtgaacttcaagacccgccacaacattgaagatggaagcgttcaactagcagaccattatcaacaaaatactccaattggcgatggccctgtccttttaccagacaaccattacctgtccacacaatctgccctttcgaaagatcccaacgaaaagagagaccacatggtccttcttgagtttgtaacagctgctgggattacacatggcatggatgaactgtacaactga

SEQ ID NO: 179 - DNA, 3186 bp, Human
atgggaggccgcgtctttctcgtctttctcgcattctgtgtctggctgactctgccgggagctgaaacccaggactccaggggctgtgcccggtggtgccctcaggactcctcgtgtgtcaatgccaccgcctgtcgctgcaatccagggttcagctctttttctgagatcatcaccacccccatggagacttgtgacgacatcaacgagtgtgcaacactgtcgaaagtgtcatgcggaaaattctcggactgctggaacacagaggggagctacgactgcgtgtgcagcccaggatatgagcctgtttctggggcaaaaacattcaagaatgagagcgagaacacgtgtcaagatgtggacgaatgtcagcagaacccaaggctctgtaaaagctacggcacctgcgtcaacacccttggcagctatacctgccagtgcctgcctggcttcaagttcatacctgaggatccgaaggtctgcacagatgtgaatgaatgcacctccggacaaaacccatgccacagctccacccactgcctcaacaacgtgggcagctatcagtgccgctgccgcccgggctggcaaccgattccggggtcccccaatggcccaaacaataccgtctgtgaagatgtggacgagtgcagctccgggcagcatcagtgtgacagctccaccgtctgcttcaacaccgtgggttcatacagctgccgctgccgcccaggctggaagcccagacacggaatcccgaataaccaaaaggacactgtctgtgaagatatgactttctccacctggaccccgccccctggagtccacagccagacgctttcccgattcttcgacaaagtccaggacctgggcagagactacaagccaggcttggccaataacaccatccagagcatcttacaggcgctggatgagctgctggaggtccctggggacctggagaccctgccccgcttacagcagcactgtgtggccagtcacctgctggatggcctagaggatgtcctcagaggcctgagcaagaacctttccaatgggctgttgaacttcagttatcctgcaggcacagaattgtccctggaggtgcagaagcaagtagacaggagtgtcaccttgagacagaatcaggcagtgatgcagctcgactggaatcaggcacagaaatctggtgacccaggcccttctgtggtgggccttgtctccattccagggatgggcaagttgctggctgaggcccctctggtcctggaacctgagaagcagatgcttctgcatgagacacaccagggcttgctgcaggacggctcccccatcctgctctcagatgtgatctctgcctttctgagcaacaacgacacccaaaacctcagctccccagttaccttcaccttctcccaccgttcagtgatcccgagacagaaggtgctctgtgtcttctgggagcatggccagaatggatgtggtcactgggccaccacaggctgcagcacaataggcaccagagacaccagcaccatctgccgttgcacccacctgagcagctttgccgtcctcatggcccactacgatgtgcaggaggaggatcccgtgctgactgtcatcacctacatggggctgagcgtctctctgctgtgcctcctcctggcggccctcacttttctcctgtgtaaagccatccagaacaccagcacctcactgcatctgcagctctcgctctgcctcttcctggcccacctcctcttcctcgtggcaattgatcaaaccggacacaaggtgctgtgctccatcatcgccggtaccttgcactatctctacctggccaccttgacctggatgctgctggaggccctgtacctcttcctcactgcacggaacctgacggtggtcaactactcaagcatcaacagattcatgaagaagctcatgttccctgtgggctacggagtcccagctgtgacagtggccatttctgcagcctccaggcctcacctttatggaacaccttcccgctgctggctccaaccagaaaagggatttatatggggcttccttggacctgtctgcgccatcttctctgtgaatttagttctctttctggtgactctctggattttgaaaaacagactctcctccctcaatagtgaagtgtccaccctccggaacacaaggatgctggcatttaaagcgacagctcagctgttcatcctgggctgcacgtggtgtctgggcatcttgcaggtgggtccggctgcccgggtcatggcctacctcttcaccatcatcaacagcctgcagggtgtcttcatcttcctggtgtactgcctcctcagccagcaggtccgggagcaatatgggaaatggtccaaagggatcaggaaattgaaaactgagtctgagatgcacacactctccagcagtgctaaggctgacacctccaaacccagcacggttaacgctagcaaaggagaagaactcttcactggagttgtcccaattcttgttgaattagatggtgatgttaacggccacaagttctctgtcagtggagagggtgaaggtgatgcaacatacggaaaacttaccctgaagttcatctgcactactggcaaactgcctgttccatggccaacactagtcactactctgtgctatggtgttcaatgcttttcaagatacccggatcatatgaaacggcatgactttttcaagagtgccatgcccgaaggttatgtacaggaaaggaccatcttcttcaaagatgacggcaactacaagacacgtgctgaagtcaagtttgaaggtgatacccttgttaatagaatcgagttaaaaggtattgacttcaaggaagatggcaacattctgggacacaaattggaatacaactataactcacacaatgtatacatcatggcagacaaacaaaagaatggaatcaaagtgaacttcaagacccgccacaacattgaagatggaagcgttcaactagcagaccattatcaacaaaatactccaattggcgatggccctgtccttttaccagacaaccattacctgtccacacaatctgccctttcgaaagatcccaacgaaaagagagaccacatggtccttcttgagtttgtaacagctgctgggattacacatggcatggatgaactgtacaactga

SEQ ID NO: 180 - DNA, 2262 bp, Human
atgggacataacgggagctggatctctccaaatgccagcgagccgcacaacgcgtccggcgccgaggctgcgggtgtgaaccgcagcgcgctcggggagttcggcgaggcgcagctgtaccgccagttcaccaccaccgtgcaggtcgtcatcttcataggctcgctgctcggaaacttcatggtgttatggtcaacttgccgcacaaccgtgttcaaatctgtcaccaacaggttcattaaaaacctggcctgctcggggatttgtgccagcctggtctgtgtgcccttcgacatcatcctcagcaccagtcctcactgttgctggtggatctacaccatgctcttctgcaaggtcgtcaaatttttgcacaaagtattctgctctgtgaccatcctcagcttccctgctattgctttggacaggtactactcagtcctctatccactggagaggaaaatatctgatgccaagtcccgtgaactggtgatgtacatctgggcccatgcagtggtggccagtgtccctgtgtttgcagtaaccaatgtggctgacatctatgccacgtccacctgcacggaagtctggagcaactccttgggccacctggtgtacgttctggtgtataacatcaccacggtcattgtgcctgtggtggtggtgttcctcttcttgatactgatccgacgggccctgagtgccagccagaagaagaaggtcatcatagcagcgctccggaccccacagaacaccatctctattccctatgcctcccagcgggaggccgagctgcacgccaccctgctctccatggtgatggtcttcatcttgtgtagcgtgccctatgccaccctggtcgtctaccagactgtgctcaatgtccctgacacttccgtcttcttgctgctcactgctgtttggctgcccaaagtctccctgctggcaaaccctgttctctttcttactgtgaacaaatctgtccgcaagtgcttgatagggaccctggtgcaactacaccaccggtacagtcgccgtaatgtggtcagtacagggagtggcatggctgaggccagcctggaacccagcatacgctcgggtagccagctcctggagatgttccacattgggcagcagcagatctttaagcccacagaggatgaggaagagagtgaggccaagtacattggctcagctgacttccaggccaaggagatatttagcacctgcctggagggagagcaggggccacagtttgcgccctctgccccacccctgagcacagtggactctgtatcccaggtggcaccggcagcccctgtggaacctgaaacattccctgataagtattccctgcagtttggctttgggccttttgagttgcctcctcagtggctctcagagacccgaaacagcaagaagcggctgcttccccccttgggcaacaccccagaagagctgatccagacaaaggtgcccaaggtaggcagggtggagcggaagatgagcagaaacaataaagtgagcatttttccaaaggtggattccgctagcaaaggagaagaactcttcactggagttgtcccaattcttgttgaattagatggtgatgttaacggccacaagttctctgtcagtggagagggtgaaggtgatgcaacatacggaaaacttaccctgaagttcatctgcactactggcaaactgcctgttccatggccaacactagtcactactctgtgctatggtgttcaatgcttttcaagatacccggatcatatgaaacggcatgactttttcaagagtgccatgcccgaaggttatgtacaggaaaggaccatcttcttcaaagatgacggcaactacaagacacgtgctgaagtcaagtttgaaggtgatacccttgttaatagaatcgagttaaaaggtattgacttcaaggaagatggcaacattctgggacacaaattggaatacaactataactcacacaatgtatacatcatggcagacaaacaaaagaatggaatcaaagtgaacttcaagacccgccacaacattgaagatggaagcgttcaactagcagaccattatcaacaaaatactccaattggcgatggccctgtccttttaccagacaaccattacctgtccacacaatctgccctttcgaaagatcccaacgaaaagagagaccacatggtccttcttgagtttgtaacagctgctgggattacacatggcatggatgaactgtacaactga

SEQ ID NO: 181 - DNA, 1803 bp, Human
atggatctgcacctcttcgactacgccgagccagggaacttctcggacatcagctggccatgcaacagcagcgactgcatcgtggtggacacggtgatgtgtcccaacatgcccaacaaaagcgtcctgctctacacgctctccttcatttacattttcatcttcgtcatcggcatgattgccaactccgtggtggtctgggtgaatatccaggccaagaccacaggctatgacacgcactgctacatcttgaacctggccattgccgacctgtgggttgtcctcaccatcccagtctgggtggtcagtctcgtgcagcacaaccagtggcccatgggcgagctcacgtgcaaagtcacacacctcatcttctccatcaacctcttcggcagcattttcttcctcacgtgcatgagcgtggaccgctacctctccatcacctacttcaccaacacccccagcagcaggaagaagatggtacgccgtgtcgtctgcatcctggtgtggctgctggccttctgcgtgtctctgcctgacacctactacctgaagaccgtcacgtctgcgtccaacaatgagacctactgccggtccttctaccccgagcacagcatcaaggagtggctgatcggcatggagctggtctccgttgtcttgggctttgccgttcccttctccattatcgctgtcttctacttcctgctggccagagccatctcggcgtccagtgaccaggagaagcacagcagccggaagatcatcttctcctacgtggtggtcttccttgtctgctggctgccctaccacgtggcggtgctgctggacatcttctccatcctgcactacatccctttcacctgccggctggagcacgccctcttcacggccctgcatgtcacacagtgcctgtcgctggtgcactgctgcgtcaaccctgtcctctacagcttcatcaatcgcaactacaggtacgagctgatgaaggccttcatcttcaagtactcggccaaaacagggctcaccaagctcatcgatgcctccagagtctcagagacggagtactctgccttggagcagagcaccaaagctagcaaaggagaagaactcttcactggagttgtcccaattcttgttgaattagatggtgatgttaacggccacaagttctctgtcagtggagagggtgaaggtgatgcaacatacggaaaacttaccctgaagttcatctgcactactggcaaactgcctgttccatggccaacactagtcactactctgtgctatggtgttcaatgcttttcaagatacccggatcatatgaaacggcatgactttttcaagagtgccatgcccgaaggttatgtacaggaaaggaccatcttcttcaaagatgacggcaactacaagacacgtgctgaagtcaagtttgaaggtgatacccttgttaatagaatcgagttaaaaggtattgacttcaaggaagatggcaacattctgggacacaaattggaatacaactataactcacacaatgtatacatcatggcagacaaacaaaagaatggaatcaaagtgaacttcaagacccgccacaacattgaagatggaagcgttcaactagcagaccattatcaacaaaatactccaattggcgatggccctgtccttttaccagacaaccattacctgtccacacaatctgccctttcgaaagatcccaacgaaaagagagaccacatggtccttcttgagtttgtaacagctgctgggattacacatggcatggatgaactgtacaactga

SEQ ID NO: 182 - DNA, 2019 bp, Human
atggaggatctctttagcccctcaattctgccgccggcgcccaacatttccgtgcccatcttgctgggctggggtctcaacctgaccttggggcaaggagcccctgcctctggaccgcccagccgccgcgtccgcctggtgttcctgggggtcatcctggtggtggcggtggcaggcaacaccacagtgctgtgccgcctgtgcggcggcggcgggccctgggcgggccccaagcgtcgcaagatggacttcctgctggtgcagctggccctggcggacctgtacgcgtgcgggggcacggcgctgtcacagctggcctgggaactgctgggcgagccccgcgcggccacgggggacctggcgtgccgcttcctgcagctgctacaggcatccgggcggggcgcctcggcccacctcgtggtgctcatcgccctcgagcgccggcgcgcggtgcgtcttccgcacggccggccgctgcccgcgcgtgccctcgccgccctgggctggctgctggcactgctgctggcgctgcccccggccttcgtggtgcgcggggactccccctcgccgctgccgccgccgccgccgccaacgtccctgcagccaggcgcgcccccggccgcccgcgcctggccggggcagcgtcgctgccacgggatcttcgcgcccctgccgcgctggcacctgcaggtctacgcgttctacgaggccgtcgcgggcttcgtcgcgcctgttacggtcctgggcgtcgcttgcggccacctactctccgtctggtggcggcaccggccgcaggcccccgcggctgcagcgccctggtcggcgagcccaggtcgagcccctgcgcccagcgcgctgccccgcgccaaggtgcagagcctgaagatgagcctgctgctggcgctgctgttcgtgggctgcgagctgccctactttgccgcccggctggcggccgcgtggtcgtccgggcccgcgggagactgggagggagagggcctgtcggcggcgctgcgcgtggtggcgatggccaacagcgctctcaatcccttcgtctacctcttcttccaggcgggcgactgccggctccggcgacagctgcggaagcggctgggctctctgtgctgcgcgccgcagggaggcgcggaggacgaggaggggccccggggccaccaggcgctctaccgccaacgctggccccaccctcattatcaccatgctcggcgggaaccgctggacgagggcggcttgcgcccaccccctccgcgccccagacccctgccttgctcctgcgaaagtgccttcgctagcaaaggagaagaactcttcactggagttgtcccaattcttgttgaattagatggtgatgttaacggccacaagttctctgtcagtggagagggtgaaggtgatgcaacatacggaaaacttaccctgaagttcatctgcactactggcaaactgcctgttccatggccaacactagtcactactctgtgctatggtgttcaatgcttttcaagatacccggatcatatgaaacggcatgactttttcaagagtgccatgcccgaaggttatgtacaggaaaggaccatcttcttcaaagatgacggcaactacaagacacgtgctgaagtcaagtttgaaggtgatacccttgttaatagaatcgagttaaaaggtattgacttcaaggaagatggcaacattctgggacacaaattggaatacaactataactcacacaatgtatacatcatggcagacaaacaaaagaatggaatcaaagtgaacttcaagacccgccacaacattgaagatggaagcgttcaactagcagaccattatcaacaaaatactccaattggcgatggccctgtccttttaccagacaaccattacctgtccacacaatctgccctttcgaaagatcccaacgaaaagagagaccacatggtccttcttgagtttgtaacagctgctgggattacacatggcatggatgaactgtacaactga

SEQ ID NO: 183 - DNA, 1629 bp, Human
atgctgagcactggggtggtgagcttcttctccctcaagtcggactcggcgcccccctggatggtgctggctgtgctgtggtgctccatggcacagacgctgctgctgccctccttcatctggtcctgcgagcgctaccgcgccgacgtgcgcacagtgtgggagcaatgcgtggccatcatgtctgaggaggatggagatgacgatgggggctgtgacgactatgcagagggccgagtttgcaaagttcgctttgatgctaacggagccacaggaccagggagccgggaccccgcccaggtgaagctgctgcctggaaggcacatgctcttccctcctcttgagagagtccactacttacaggtccccctatcccggcgtctgtcccatgatgagacaaacatcttctctacccctcgggaaccaggctccttcctgcacaagtggtcatcctctgatgacatccgggtcctcccagcccagagccgggccctcgggggtcctcctgagtacctgggacaaagacacaggttggaggacgaggaggacgaggaagaggctgaaggtggggggctggccagccttcgccaattcttggagagtggggttctggggtcaggtgggggacccccacggggtcctggcttcttccgggaggagatcaccaccttcatcgatgagacacctctgccttctccgactgcctcaccagggcactctcctcgtcggccccggccactgggcctctcaccccgccgactctcccttgggtcccctgagagcagagccgttggacttcctttgggactaagcgcagggagacgctgctccctgacggggggtgaagaaagtgcaagggcttggggaggatcctggggcccaggcaaccccatctttccccagctgaccctggctagcaaaggagaagaactcttcactggagttgtcccaattcttgttgaattagatggtgatgttaacggccacaagttctctgtcagtggagagggtgaaggtgatgcaacatacggaaaacttaccctgaagttcatctgcactactggcaaactgcctgttccatggccaacactagtcactactctgtgctatggtgttcaatgcttttcaagatacccggatcatatgaaacggcatgactttttcaagagtgccatgcccgaaggttatgtacaggaaaggaccatcttcttcaaagatgacggcaactacaagacacgtgctgaagtcaagtttgaaggtgatacccttgttaatagaatcgagttaaaaggtattgacttcaaggaagatggcaacattctgggacacaaattggaatacaactataactcacacaatgtatacatcatggcagacaaacaaaagaatggaatcaaagtgaacttcaagacccgccacaacattgaagatggaagcgttcaactagcagaccattatcaacaaaatactccaattggcgatggccctgtccttttaccagacaaccattacctgtccacacaatctgccctttcgaaagatcccaacgaaaagagagaccacatggtccttcttgagtttgtaacagctgctgggattacacatggcatggatgaactgtacaactga

SEQ ID NO: 184 - DNA, 1716 bp, Human
atgcctgctaattacacgtgtaccaggccagatggagacaatacagattttcgatactttatttatgcagtgacatacactgtcattcttgtgccaggtctcatagggaatatattagccctgtgggtattctatggttatatgaaagaaacaaaacgagctgtgatatttatgataaacttagccattgctgacttactacaagttctttccttgccactgaggatcttctactacttgaatcatgactggccatttgggcctggtctctgcatgttctgtttctacctgaagtatgtcaacatgtatgcaagcatctacttcttggtctgcatcagtgtgcgacgattttggtttctcatgtacccctttcgcttccatgactgcaaacagaaatatgacctgtacatcagcattgctggctggctgatcatctgccttgcctgtgtactctttccactcctcagaaccagtgatgatacctctggcaataggaccaaatgctttgtggatcttcctaccaggaatgtcaacctggcccagtccgttgttatgatgaccattggcgagttgattgggtttgtaactccgcttctgattgtcctatattgtacctggaagacggttttatcactgcaagataaatatcccatggcccaagatcttggagagaaacagaaagccttgaagatgattctaacctgtgcaggggtattcctaatttgctttgcaccttatcatttcagttttcctttagatttcctggtgaagtccaatgaaattaaaagctgcctagccagaagggtgattctaatatttcattctgtggcattgtgtcttgctagtctgaattcatgtcttgacccagtcatatactacttttccactaatgagttccgaagacggctttcaagacaagatttgcatgacagcatccaactccatgcaaaatcctttgtgagtaaccatacagcttccaccatgacacctgaattatgcgctagcaaaggagaagaactcttcactggagttgtcccaattcttgttgaattagatggtgatgttaacggccacaagttctctgtcagtggagagggtgaaggtgatgcaacatacggaaaacttaccctgaagttcatctgcactactggcaaactgcctgttccatggccaacactagtcactactctgtgctatggtgttcaatgcttttcaagatacccggatcatatgaaacggcatgactttttcaagagtgccatgcccgaaggttatgtacaggaaaggaccatcttcttcaaagatgacggcaactacaagacacgtgctgaagtcaagtttgaaggtgatacccttgttaatagaatcgagttaaaaggtattgacttcaaggaagatggcaacattctgggacacaaattggaatacaactataactcacacaatgtatacatcatggcagacaaacaaaagaatggaatcaaagtgaacttcaagacccgccacaacattgaagatggaagcgttcaactagcagaccattatcaacaaaatactccaattggcgatggccctgtccttttaccagacaaccattacctgtccacacaatctgccctttcgaaagatcccaacgaaaagagagaccacatggtccttcttgagtttgtaacagctgctgggattacacatggcatggatgaactgtacaactga

SEQ ID NO: 185 - DNA, 1734 bp, Human
  misc feature (330)...(330): n stands for any base
atgaatggccttgaagtggctcccccaggtctgatcaccaacttctccctggccacggcagagcaatgtggccaggagacgccactggagaacatgctgttcgcctccttctaccttctggattttatcctggctttagttggcaataccctggctctgtggcttttcatccgagaccacaagtccgggaccccggccaacgtgttcctgatgcatctggccgtggccgacttgtcgtgcgtgctggtcctgcccacccgcctggtctaccacttctctgggaaccactggccatttggggaaatcgcatgccgtctcaccggcttcctnttctacctcaacatgtacgccagcatctacttcctcacctgcatcagcgccgaccgtttcctggccattgtgcacccggtcaagtccctcaagctccgcaggcccctctacgcacacctggcctgtgccttcctgtgggtggtggtggctgtggccatggccccgctgctggtgagcccacagaccgtgcagaccaaccacacggtggtctgcctgcagctgtaccgggagaaggcctcccaccatgccctggtgtccctggcagtggccttcaccttcccgttcatcaccacggtcacctgctacctgctgatcatccgcagcctgcggcagggcctgcgtgtggagaagcgcctcaagaccaaggcagtgcgcatgatcgccatagtgctggccatcttcctggtctgcttcgtgccctaccacgtcaaccgctccgtctacgtgctgcactaccgcagccatggggcctcctgcgccacccagcgcatcctggccctggcaaaccgcatcacctcctgcctcaccagcctcaacggggcactcgaccccatcatgtatttcttcgtggctgagaagttccgccacgccctgtgcaacttgctctgtggcaaaaggctcaagggcccgccccccagcttcgaagggaaaaccaacgagagctcgctgagtgccaagtcagagctggctagcaaaggagaagaactcttcactggagttgtcccaattcttgttgaattagatggtgatgttaacggccacaagttctctgtcagtggagagggtgaaggtgatgcaacatacggaaaacttaccctgaagttcatctgcactactggcaaactgcctgttccatggccaacactagtcactactctgtgctatggtgttcaatgcttttcaagatacccggatcatatgaaacggcatgactttttcaagagtgccatgcccgaaggttatgtacaggaaaggaccatcttcttcaaagatgacggcaactacaagacacgtgctgaagtcaagtttgaaggtgatacccttgttaatagaatcgagttaaaaggtattgacttcaaggaagatggcaacattctgggacacaaattggaatacaactataactcacacaatgtatacatcatggcagacaaacaaaagaatggaatcaaagtgaacttcaagacccgccacaacattgaagatggaagcgttcaactagcagaccattatcaacaaaatactccaattggcgatggccctgtccttttaccagacaaccattacctgtccacacaatctgccctttcgaaagatcccaacgaaaagagagaccacatggtccttcttgagtttgtaacagctgctgggattacacatggcatggatgaactgtacaactga

SEQ ID NO: 186 - DNA, 1644 bp, Human
atgaatggcacctacaacacctgtggctccagcgacctcacctggcccccagcgatcaagctgggcttctacgcctacttgggcgtcctgctggtgctaggcctgctgctcaacagcctggcgctctgggtgttctgctgccgcatgcagcagtggacggagacccgcatctacatgaccaacctggcggtggccgacctctgcctgctgtgcaccttgcccttcgtgctgcactccctgcgagacacctcagacacgccgctgtgccagctctcccagggcatctacctgaccaacaggtacatgagcatcagcctggtcacggccatcgccgtggaccgctatgtggccgtgcggcacccgctgcgtgcccgcgggctgcggtcccccaggcaggctgcggccgtgtgcgcggtcctctgggtgctggtcatcggctccctggtggctcgctggctcctggggattcaggagggcggcttctgcttcaggagcacccggcacaatttcaactccatggcgttcccgctgctgggattctacctgcccctggccgtggtggtcttctgctccctgaaggtggtgactgccctggcccagaggccacccaccgacgtggggcaggcagaggccacccgcaaggctgcccgcatggtctgggccaacctcctggtgttcgtggtctgcttcctgcccctgcacgtggggctgacagtgcgcctcgcagtgggctggaacgcctgtgccctcctggagacgatccgtcgcgccctgtacataaccagcaagctctcagatgccaactgctgcctggacgccatctgctactactacatggccaaggagttccaggaggcgtctgcactggccgtggctccccgtgctaaggcccacaaaagccaggactctctgtgcgtgaccctcgccgctagcaaaggagaagaactcttcactggagttgtcccaattcttgttgaattagatggtgatgttaacggccacaagttctctgtcagtggagagggtgaaggtgatgcaacatacggaaaacttaccctgaagttcatctgcactactggcaaactgcctgttccatggccaacactagtcactactctgtgctatggtgttcaatgcttttcaagatacccggatcatatgaaacggcatgactttttcaagagtgccatgcccgaaggttatgtacaggaaaggaccatcttcttcaaagatgacggcaactacaagacacgtgctgaagtcaagtttgaaggtgatacccttgttaatagaatcgagttaaaaggtattgacttcaaggaagatggcaacattctgggacacaaattggaatacaactataactcacacaatgtatacatcatggcagacaaacaaaagaatggaatcaaagtgaacttcaagacccgccacaacattgaagatggaagcgttcaactagcagaccattatcaacaaaatactccaattggcgatggccctgtccttttaccagacaaccattacctgtccacacaatctgccctttcgaaagatcccaacgaaaagagagaccacatggtccttcttgagtttgtaacagctgctgggattacacatggcatggatgaactgtacaactga

SEQ ID NO: 187 - DNA, 2040 bp, Human
atggccatccacaaagccttggtgatgtgcctgggactgcctctcttcctgttcccaggggcctgggcccagggccatgtcccacccggctgcagccaaggcctcaaccccctgtactacaacctgtgtgaccgctctggggcgtggggcatcgtcctggaggccgtggctggggcgggcattgtcaccacgtttgtgctcaccatcatcctggtggccagcctcccctttgtgcaggacaccaagaaacggagcctgctggggacccaggtattcttccttctggggaccctgggcctcttctgcctcgtgtttgcctgtgtggtgaagcccgacttctccacctgtgcctctcggcgcttcctctttggggttctgttcgccatctgcttctcttgtctggcggctcacgtctttgccctcaacttcctggcccggaagaaccacgggccccggggctgggtgatcttcactgtggctctgctgctgaccctggtagaggtcatcatcaatacagagtggctgatcatcaccctggttcggggcagtggcgagggcggccctcagggcaacagcagcgcaggctgggccgtggcctccccctgtgccatcgccaacatggactttgtcatggcactcatctacgtcatgctgctgctgctgggtgccttcctgggggcctggcccgccctgtgtggccgctacaagcgctggcgtaagcatggggtctttgtgctcctcaccacagccacctccgttgccatatgggtggtgtggatcgtcatgtatacttacggcaacaagcagcacaacagtcccacctgggatgaccccacgctggccatcgccctcgccgccaatgcctgggccttcgtcctcttctacgtcatccccgaggtctcccaggtgaccaagtccagcccagagcaaagctaccagggggacatgtaccccacccggggcgtgggctatgagaccatcctgaaagagcagaagggtcagagcatgttcgtggagaacaaggccttttccatggatgagccggttgcagctaagaggccggtgtcaccatacagcgggtacaatgggcagctgctgaccagtgtgtaccagcccactgagatggccctgatgcacaaagttccgtccgaaggagcttacgacatcatcctcccacgggccaccgccaacagccaggtgatgggcagtgccaactcgaccctgcgggctgaagacatgtactcggcccagagccaccaggcggccacaccgccgaaagacggcaagaactctcaggtctttagaaacccctacgtgtgggacgctagcaaaggagaagaactcttcactggagttgtcccaattcttgttgaattagatggtgatgttaacggccacaagttctctgtcagtggagagggtgaaggtgatgcaacatacggaaaacttaccctgaagttcatctgcactactggcaaactgcctgttccatggccaacactagtcactactctgtgctatggtgttcaatgcttttcaagatacccggatcatatgaaacggcatgactttttcaagagtgccatgcccgaaggttatgtacaggaaaggaccatcttcttcaaagatgacggcaactacaagacacgtgctgaagtcaagtttgaaggtgatacccttgttaatagaatcgagttaaaaggtattgacttcaaggaagatggcaacattctgggacacaaattggaatacaactataactcacacaatgtatacatcatggcagacaaacaaaagaatggaatcaaagtgaacttcaagacccgccacaacattgaagatggaagcgttcaactagcagaccattatcaacaaaatactccaattggcgatggccctgtccttttaccagacaaccattacctgtccacacaatctgccctttcgaaagatcccaacgaaaagagagaccacatggtccttcttgagtttgtaacagctgctgggattacacatggcatggatgaactgtacaactga

SEQ ID NO: 188 - DNA, 1878 bp, Human
atgaatcggcaccatctgcaggatcactttctggaaatagacaagaagaactgctgtgtgttccgagatgacttcattgccaaggtgttgccgccggtgttggggctggagtttatctttgggcttctgggcaatggccttgccctgtggattttctgtttccacctcaagtcctggaaatccagccggattttcctgttcaacctggcagtagctgactttctactgatcatctgcctgccgttcgtgatggactactatgtgcggcgttcagactggaagtttggggacatcccttgccggctggtgctcttcatgtttgccatgaaccgccagggcagcatcatcttcctcacggtggtggcggtagacaggtatttccgggtggtccatccccaccacgccctgaacaagatctccaattggacagcagccatcatctcttgccttctgtggggcatcactgttggcctaacagtccacctcctgaagaagaagttgctgatccagaatggccctgcaaatgtgtgcatcagcttcagcatctgccataccttccggtggcacgaagctatgttcctcctggagttcctcctgcccctgggcatcatcctgttctgctcagccagaattatctggagcctgcggcagagacaaatggaccggcatgccaagatcaagagagccatcaccttcatcatggtggtggccatcgtctttgtcatctgcttccttcccagcgtggttgtgcggatccgcatcttctggctcctgcacacttcgggcacgcagaattgtgaagtgtaccgctcggtggacctggcgttctttatcactctcagcttcacctacatgaacagcatgctggaccccgtggtgtactacttctccagcccatcctttcccaacttcttctccactttgatcaaccgctgcctccagaggaagatgacaggtgagccagataataaccgcagcacgagcgtcgagctcacaggggaccccaacaaaaccagaggcgctccagaggcgttaatggccaactccggtgagccatggagcccctcttatctgggcccaacctcaaataaccattccaagaagggacattgtcaccaagaaccagcatctctggagaaacagttgggctgttgcatcgaggctagcaaaggagaagaactcttcactggagttgtcccaattcttgttgaattagatggtgatgttaacggccacaagttctctgtcagtggagagggtgaaggtgatgcaacatacggaaaacttaccctgaagttcatctgcactactggcaaactgcctgttccatggccaacactagtcactactctgtgctatggtgttcaatgcttttcaagatacccggatcatatgaaacggcatgactttttcaagagtgccatgcccgaaggttatgtacaggaaaggaccatcttcttcaaagatgacggcaactacaagacacgtgctgaagtcaagtttgaaggtgatacccttgttaatagaatcgagttaaaaggtattgacttcaaggaagatggcaacattctgggacacaaattggaatacaactataactcacacaatgtatacatcatggcagacaaacaaaagaatggaatcaaagtgaacttcaagacccgccacaacattgaagatggaagcgttcaactagcagaccattatcaacaaaatactccaattggcgatggccctgtccttttaccagacaaccattacctgtccacacaatctgccctttcgaaagatcccaacgaaaagagagaccacatggtccttcttgagtttgtaacagctgctgggattacacatggcatggatgaactgtacaactga

SEQ ID NO: 189 - DNA, 2337 bp, Human
atgaactcaacaggccaccttcaggatgcccccaatgccacctcgctccatgtgcctcactcacaggaaggaaacagcacctctctccaggagggtcttcaggatctcatccacacagccaccttggtgacctgtacttttctactggcggtcatcttctgcctgggttcctatggcaacttcattgtcttcttgtccttcttcgatccagccttcaggaaattcagaaccaactttgatttcatgatcctgaacctgtccttctgtgacctcttcatttgtggagtgacagcccccatgttcacctttgtgttattcttcagctcagccagtagtatcccggatgctttctgcttcactttccatctcaccagttcaggcttcatcatcatgtctctgaagacagtggcagtgatcgccctgcaccggctccggatggtgttggggaaacagcctaatcgcacggcctcctttccctgcaccgtactcctcaccctgcttctctgggccaccagtttcacccttgccaccttggctaccttgaaaaccagcaagtcccacctctgtcttcccatgtccagtctgattgctggaaaagggaaagccattttgtctctctatgtggtcgacttcaccttctgtgttgctgtggtctctgtctcttacatcatgattgctcagaccctgcggaagaacgctcaagtcagaaagtgcccccctgtaatcacagtcgatgcttccagaccacagcctttcatgggggtccctgtgcagggaggtggagatcccatccagtgtgccatgccggctctgtataggaaccagaattacaacaaactgcagcacgttcagacccgtggatataccaagagtcccaaccaactggtcacccctgcagcaagccgactccagctcgtatcagccatcaacctctccactgccaaggattccaaagccgtggtcacctgtgtgatcattgtgctgtcagtcctggtgtgctgtcttccactggggatttccttggtacaggtggttctctccagcaatgggagcttcattctttaccagtttgaattgtttggatttactcttatatttttcaagtcaggattaaacccttttatatattctcggaacagtgcagggctgagaaggaaagtgctctggtgcctccaatacataggcctgggttttttctgctgcaaacaaaagactcgacttcgagccatgggaaaagggaacctcgaagtcaacagaaacaaatcctcccatcatgaaacaaactctgcctacatgttatctccaaagccacagaagaaatttgtggaccaggcttgtggcccaagtcattcaaaagaaagtatggtgagtcccaagatctctgctggacatcaacactgtggtcagagcagctcgacccccatcaacactcggattgaaccttactacagcatctataacagcagcccttcccaggaggagagcagcccatgtaacttacagccagtaaactcttttggatttgccaattcatatattgccatgcattatcacaccactaatgacttagtgcaggaatatgacagcacttcagccaagcagattccagtcccctccgttgctagcaaaggagaagaactcttcactggagttgtcccaattcttgttgaattagatggtgatgttaacggccacaagttctctgtcagtggagagggtgaaggtgatgcaacatacggaaaacttaccctgaagttcatctgcactactggcaaactgcctgttccatggccaacactagtcactactctgtgctatggtgttcaatgcttttcaagatacccggatcatatgaaacggcatgactttttcaagagtgccatgcccgaaggttatgtacaggaaaggaccatcttcttcaaagatgacggcaactacaagacacgtgctgaagtcaagtttgaaggtgatacccttgttaatagaatcgagttaaaaggtattgacttcaaggaagatggcaacattctgggacacaaattggaatacaactataactcacacaatgtatacatcatggcagacaaacaaaagaatggaatcaaagtgaacttcaagacccgccacaacattgaagatggaagcgttcaactagcagaccattatcaacaaaatactccaattggcgatggccctgtccttttaccagacaaccattacctgtccacacaatctgccctttcgaaagatcccaacgaaaagagagaccacatggtccttcttgagtttgtaacagctgctgggattacacatggcatggatgaactgtacaactga

SEQ ID NO: 190 - DNA, 1755 bp, Human
atgtacaacgggtcgtgctgccgcatcgagggggacaccatctcccaggtgatgccgccgctgctcattgtggcctttgtgctgggcgcactaggcaatggggtcgccctgtgtggtttctgcttccacatgaagacctggaagcccagcactgtttaccttttcaatttggccgtggctgatttcctccttatgatctgcctgccttttcggacagactattacctcagacgtagacactgggcttttggggacattccctgccgagtggggctcttcacgttggccatgaacagggccgggagcatcgtgttccttacggtggtggctgcggacaggtatttcaaagtggtccacccccaccacgcggtgaacactatctccacccgggtggcggctggcatcgtctgcaccctgtgggccctggtcatcctgggaacagtgtatcttttgctggagaaccatctctgcgtgcaagagacggccgtctcctgtgagagcttcatcatggagtcggccaatggctggcatgacatcatgttccagctggagttctttatgcccctcggcatcatcttattttgctccttcaagattgtttggagcctgaggcggaggcagcagctggccagacaggctcggatgaagaaggcgacccggttcatcatggtggtggcaattgtgttcatcacatgctacctgcccagcgtgtctgctagactctatttcctctggacggtgccctcgagtgcctgcgatccctctgtccatggggccctgcacataaccctcagcttcacctacatgaacagcatgctggatcccctggtgtattatttttcaagcccctcctttcccaaattctacaacaagctcaaaatctgcagtctgaaacccaagcagccaggacactcaaaaacacaaaggccggaagagatgccaatttcgaacctcggtcgcaggagttgcatcagtgtggcaaatagtttccaaagccagtctgatgggcaatgggatccccacattgttgagtggcacgctagcaaaggagaagaactcttcactggagttgtcccaattcttgttgaattagatggtgatgttaacggccacaagttctctgtcagtggagagggtgaaggtgatgcaacatacggaaaacttaccctgaagttcatctgcactactggcaaactgcctgttccatggccaacactagtcactactctgtgctatggtgttcaatgcttttcaagatacccggatcatatgaaacggcatgactttttcaagagtgccatgcccgaaggttatgtacaggaaaggaccatcttcttcaaagatgacggcaactacaagacacgtgctgaagtcaagtttgaaggtgatacccttgttaatagaatcgagttaaaaggtattgacttcaaggaagatggcaacattctgggacacaaattggaatacaactataactcacacaatgtatacatcatggcagacaaacaaaagaatggaatcaaagtgaacttcaagacccgccacaacattgaagatggaagcgttcaactagcagaccattatcaacaaaatactccaattggcgatggccctgtccttttaccagacaaccattacctgtccacacaatctgccctttcgaaagatcccaacgaaaagagagaccacatggtccttcttgagtttgtaacagctgctgggattacacatggcatggatgaactgtacaactga

SEQ ID NO: 191 - DNA, 1758 bp, Human
atgggggatgagctggcaccttgccctgtgggcactacagcttggccggccctgatccagctcatcagcaagacaccctgcatgccccaagcagccagcaacacttccttgggcctgggggacctcagggtgcccagctccatgctgtactggcttttccttccctcaagcctgctggctgcagccacactggctgtcagccccctgctgctggtgaccatcctgcggaaccaacggctgcgacaggagccccactacctgctcccggctaacatcctgctctcagacctggcctacattctcctccacatgctcatctcctccagcagcctgggtggctgggagctgggccgcatggcctgtggcattctcactgatgctgtcttcgccgcctgcaccagcaccatcctgtccttcaccgccattgtgctgcacacctacctggcagtcatccatccactgcgctacctctccttcatgtcccatggggctgcctggaaggcagtggccctcatctggctggtggcctgctgcttccccacattccttatttggctcagcaagtggcaggatgcccagctggaggagcaaggagcttcatacatcctaccaccaagcatgggcacccagccgggatgtggcctcctggtcattgttacctacacctccattctgtgcgttctgttcctctgcacagctctcattgccaactgtttctggaggatctatgcagaggccaagacttcaggcatctgggggcagggctattcccgggccaggggcaccctgctgatccactcagtgctgatcacattgtacgtgagcacaggggtggtgttctccctggacatggtgctgaccaggtaccaccacattgactctgggactcacacatggctcctggcagctaacagtgaggtactcatgatgcttccccgtgccatgctcccatacctgtacctgctccgctaccggcagctgttgggcatggtccggggccacctcccatccaggaggcaccaggccatctttaccatttccgctagcaaaggagaagaactcttcactggagttgtcccaattcttgttgaattagatggtgatgttaacggccacaagttctctgtcagtggagagggtgaaggtgatgcaacatacggaaaacttaccctgaagttcatctgcactactggcaaactgcctgttccatggccaacactagtcactactctgtgctatggtgttcaatgcttttcaagatacccggatcatatgaaacggcatgactttttcaagagtgccatgcccgaaggttatgtacaggaaaggaccatcttcttcaaagatgacggcaactacaagacacgtgctgaagtcaagtttgaaggtgatacccttgttaatagaatcgagttaaaaggtattgacttcaaggaagatggcaacattctgggacacaaattggaatacaactataactcacacaatgtatacatcatggcagacaaacaaaagaatggaatcaaagtgaacttcaagacccgccacaacattgaagatggaagcgttcaactagcagaccattatcaacaaaatactccaattggcgatggccctgtccttttaccagacaaccattacctgtccacacaatctgccctttcgaaagatcccaacgaaaagagagaccacatggtccttcttgagtttgtaacagctgctgggattacacatggcatggatgaactgtacaactga

SEQ ID NO: 192 - DNA, 1836 bp, Human
atgagaatggaggatgaagattacaacacttccatcagttacggtgatgaataccctgattatttagactccattgtggttttggaggacttatcccccttggaagccagggtgaccaggatcttcctggtggtggtctacagcatcgtctgcttcctcgggattctgggcaatggtctggtgatcatcattgccaccttcaagatgaagaagacagtgaacatggtctggttcctcaacctggcagtggcagatttcctgttcaacgtcttcctcccaatccatatcacctatgccgccatggactaccactgggttttcgggacagccatgtgcaagatcagcaacttccttctcatccacaacatgttcaccagcgtcttcctgctgaccatcatcagctctgaccgctgcatctctgtgctcctccctgtctggtcccagaaccaccgcagcgttcgcctggcttacatggcctgcatggtcatctgggtcctggctttcttcttgagttccccatctctcgtcttccgggacacagccaacctgcatgggaaaatatcctgcttcaacaacttcagcctgtccacacctgggtcttcctcgtggcccactcactcccaaatggaccctgtggggtatagccggcacatggtggtgactgtcacccgcttcctctgtggcttcctggtcccagtcctcatcatcacagcttgctacctcaccatcgtgtgcaaactgcagcgcaaccgcctggccaagaccaagaagcccttcaagattattgtgaccatcatcattaccttcttcctctgctggtgcccctaccacacactcaacctcctagagctccaccacactgccatgcctggctctgtcttcagcctgggtttgcccctggccactgcccttgccattgccaacagctgcatgaaccccattctgtatgttttcatgggtcaggacttcaagaagttcaaggtggccctcttctctcgcctggtcaatgctctaagtgaagatacaggccactcttcctaccccagccatagaagctttaccaagatgtcatcaatgaatgagaggacttctatgaatgagagggagaccggcatgcttgctagcaaaggagaagaactcttcactggagttgtcccaattcttgttgaattagatggtgatgttaacggccacaagttctctgtcagtggagagggtgaaggtgatgcaacatacggaaaacttaccctgaagttcatctgcactactggcaaactgcctgttccatggccaacactagtcactactctgtgctatggtgttcaatgcttttcaagatacccggatcatatgaaacggcatgactttttcaagagtgccatgcccgaaggttatgtacaggaaaggaccatcttcttcaaagatgacggcaactacaagacacgtgctgaagtcaagtttgaaggtgatacccttgttaatagaatcgagttaaaaggtattgacttcaaggaagatggcaacattctgggacacaaattggaatacaactataactcacacaatgtatacatcatggcagacaaacaaaagaatggaatcaaagtgaacttcaagacccgccacaacattgaagatggaagcgttcaactagcagaccattatcaacaaaatactccaattggcgatggccctgtccttttaccagacaaccattacctgtccacacaatctgccctttcgaaagatcccaacgaaaagagagaccacatggtccttcttgagtttgtaacagctgctgggattacacatggcatggatgaactgtacaactga

SEQ ID NO: 193 - DNA, 1776 bp, Rat
atggaagtctcaagggaaatgctatttgaagaactggacaactactcctatgccttagaatattactcccaggaacctgacgcagaggagaatgtgtacccgggaatcgttcactggatctccctgctcttatatgcccttgcgtttgttctgggaattccagggaatgccatcgtcatttggttcatgggattcaagtggaagaagacggtcaccactctttggtttctcaatctggccattgcagacttcgtctttgttctcttcctgcctctgtatatttcctatgtggcactgagtttccactggccctttggccgatggctctgcaagcttaattccttcattgcccaactgaacatgttttccagtgtattcttcttgacagtgattagcctggaccgctacattcacttgatccaccctggcttgtctcatccgcaccggaccctgaagaactcactgcttgttgttctatttgtctggctgttggcttctctgctcggaggtcctaccctgtacttccgggacaccgtggaggtcaacaaccgcattatttgttataacaacttccaggagtatgagctcaccctgatgagacaccacgttctgacctgggtgaagttcctttttggctacctcttgcctttgctgacaatgagctcctgctacctgtgcctcatcttcaagacgaagaagcaaaacattctgatatccagtaagcatctctggatgatcctgtctgtggtcatcgccttcatggtttgctggactccttttcacctgttcagcatttgggaactcagcattcatcacaacagctctttccagaacgtgctgcagggcggaatccctctctctactggcttggccttcctcaacagctgcttgaaccccatcctttacgttctaataagcaagaagtttcaagctcgattcagggcctctgttgccgaggtactaaagcggtcactgtgggaggccagttgctctggtacagtgagtgaacaactcaggagtgctgaaaccaagagcctgtctctcctagaaactgcccaagctagcaaaggagaagaactcttcactggagttgtcccaattcttgttgaattagatggtgatgttaacggccacaagttctctgtcagtggagagggtgaaggtgatgcaacatacggaaaacttaccctgaagttcatctgcactactggcaaactgcctgttccatggccaacactagtcactactctgtgctatggtgttcaatgcttttcaagatacccggatcatatgaaacggcatgactttttcaagagtgccatgcccgaaggttatgtacaggaaaggaccatcttcttcaaagatgacggcaactacaagacacgtgctgaagtcaagtttgaaggtgatacccttgttaatagaatcgagttaaaaggtattgacttcaaggaagatggcaacattctgggacacaaattggaatacaactataactcacacaatgtatacatcatggcagacaaacaaaagaatggaatcaaagtgaacttcaagacccgccacaacattgaagatggaagcgttcaactagcagaccattatcaacaaaatactccaattggcgatggccctgtccttttaccagacaaccattacctgtccacacaatctgccctttcgaaagatcccaacgaaaagagagaccacatggtccttcttgagtttgtaacagctgctgggattacacatggcatggatgaactgtacaactga

SEQ ID NO: 194 - DNA, 1707 bp, Human
atgatgtggggtgcaggcagccctctggcctggctctcagctggctcaggcaacgtgaatgtaagcagcgtgggcccagcagaggggcccacaggtccagccgcaccactgccctcgcctaaggcctgggatgtggtgctctgcatctcaggcaccctggtgtcctgcgagaatgcgctagtggtggccatcatcgtgggcactcctgccttccgtgcccccatgttcctgctggtgggcagcctggccgtggcagacctgctggcaggcctgggcctggtcctgcactttgctgctgtcttctgcatcggctcagcggagatgagcctggtgctggttggcgtgctggcaatggcctttaccgccagcatcggcagtctactggccatcactgtcgaccgctacctttctctgtacaatgccctcacctactattcagagacaacagtgacacggacctatgtgatgctggccttagtgtggggaggtgccctgggcctggggctgctgcctgtgctggcctggaactgcctggatggcctgaccacatgtggcgtggtttatccactctccaagaaccatctggtagttctggccattgccttcttcatggtgtttggcatcatgctgcagctctacgcccaaatctgccgcatcgtctgccgccatgcccagcagattgcccttcagcggcacctgctgcctgcctcccactatgtggccacccgcaagggcattgccacactggccgtggtgcttggagcctttgccgcctgctggttgcccttcactgtctactgcctgctgggtgatgcccactctccacctctctacacctatcttaccttgctccctgccacctacaactccatgatcaaccctatcatctacgccttccgcaaccaggatgtgcagaaagtgctgtgggctgtctgctgctgctgttcctcttccaagatccccttccgatcccgctcccccagtgatgtcgctagcaaaggagaagaactcttcactggagttgtcccaattcttgttgaattagatggtgatgttaacggccacaagttctctgtcagtggagagggtgaaggtgatgcaacatacggaaaacttaccctgaagttcatctgcactactggcaaactgcctgttccatggccaacactagtcactactctgtgctatggtgttcaatgcttttcaagatacccggatcatatgaaacggcatgactttttcaagagtgccatgcccgaaggttatgtacaggaaaggaccatcttcttcaaagatgacggcaactacaagacacgtgctgaagtcaagtttgaaggtgatacccttgttaatagaatcgagttaaaaggtattgacttcaaggaagatggcaacattctgggacacaaattggaatacaactataactcacacaatgtatacatcatggcagacaaacaaaagaatggaatcaaagtgaacttcaagacccgccacaacattgaagatggaagcgttcaactagcagaccattatcaacaaaatactccaattggcgatggccctgtccttttaccagacaaccattacctgtccacacaatctgccctttcgaaagatcccaacgaaaagagagaccacatggtccttcttgagtttgtaacagctgctgggattacacatggcatggatgaactgtacaactga

SEQ ID NO: 195 - DNA, 1803 bp, Human
atgaacgcgagcgccgcctcgctcaacgactcccaggtggtggtagtggcggccgaaggagcggcggcggcggccacagcagcaggggggccggacacgggcgaatggggaccccctgctgcggcggctctaggagccggcggcggagctaatgggtctctggagctgtcctcgcagctgtcggctgggccaccgggactcctgctgccagcggtgaatccgtgggacgtgctcctgtgcgtgtcggggacagtgatcgctggagaaaacgcgctggtggtggcgctcatcgcgtccactccggcgctacgcacgcccatgttcgtgctggtaggcagcctggccaccgctgacctgttggcgggctgtggcctcatcttgcactttgtgttccagtacttggtgccctcggagactgtgagtctgctcacggtgggcttcctcgtggcctccttcgccgcctctgtcagcagcctgctggccattacggtggaccgctacctgtccctgtataacgcgctcacctattactcgcgccggaccctgttgggcgtgcacctcctgcttgccgccacttggaccgtgtccctaggcctggggctgctgcccgtgctgggctggaactgcctggcagagcgcgccgcctgcagcgtggtgcgcccgctggcgcgcagccacgtggctctgctctccgccgccttcttcatggtcttcggcatcatgctgcacctgtacgtgcgcatctgccaggtggtctggcgccacgcgcaccagatcgcgctgcagcagcactgcctggcgccaccccatctcgctgccaccagaaagggtgtgggtacactggctgtggtgctgggcactttcggcgccagctggctgcccttcgccatctattgcgtggtgggcagccatgaggacccggcggtctacacttacgccaccctgctgcccgccacctacaactccatgatcaatcccatcatctatgccttccgcaaccaggagatccagcgcgccctgtggctcctgctctgtggctgtttccagtccaaagtgccctttcgttccaggtctcccagcgaggtcgctagcaaaggagaagaactcttcactggagttgtcccaattcttgttgaattagatggtgatgttaacggccacaagttctctgtcagtggagagggtgaaggtgatgcaacatacggaaaacttaccctgaagttcatctgcactactggcaaactgcctgttccatggccaacactagtcactactctgtgctatggtgttcaatgcttttcaagatacccggatcatatgaaacggcatgactttttcaagagtgccatgcccgaaggttatgtacaggaaaggaccatcttcttcaaagatgacggcaactacaagacacgtgctgaagtcaagtttgaaggtgatacccttgttaatagaatcgagttaaaaggtattgacttcaaggaagatggcaacattctgggacacaaattggaatacaactataactcacacaatgtatacatcatggcagacaaacaaaagaatggaatcaaagtgaacttcaagacccgccacaacattgaagatggaagcgttcaactagcagaccattatcaacaaaatactccaattggcgatggccctgtccttttaccagacaaccattacctgtccacacaatctgccctttcgaaagatcccaacgaaaagagagaccacatggtccttcttgagtttgtaacagctgctgggattacacatggcatggatgaactgtacaactga

SEQ ID NO: 196 - DNA, 1788 bp, Human
atggctacaacagtccctgatggttgccgcaatggcctgaaatccaagtactacagactttgtgataaggctgaagcttggggcatcgtcctagaaacggtggccacagctggggttgtgacctcggtggccttcatgctcactctcccgatcctcgtctgcaaggtgcaggactccaacaggcgaaaaatgctgcctactcagtttctcttcctcctgggtgtgttgggcatctttggcctcaccttcgccttcatcatcggactggacgggagcacagggcccacacgcttcttcctctttgggatcctcttttccatctgcttctcctgcctgctggctcatgctgtcagtctgaccaagctcgtccgggggaggaagcccctttccctgttggtgattctgggtctggccgtgggcttcagcctagtccaggatgttatcgctattgaatatattgtcctgaccatgaataggaccaacgtcaatgtcttttctgagctttccgctcctcgtcgcaatgaagactttgtcctcctgctcacctacgtcctcttcttgatggcgctgaccttcctcatgtcctccttcaccttctgtggttccttcacgggctggaagagacatggggcccacatctacctcacgatgctcctctccattgccatctgggtggcctggatcaccctgctcatgcttcctgactttgaccgcaggtgggatgacaccatcctcagctccgccttggctgccaatggctgggtgttcctgttggcttatgttagtcccgagttttggctgctcacaaagcaacgaaaccccatggattatcctgttgaggatgctttctgtaaacctcaactcgtgaagaagagctatggtgtggagaacagagcctactctcaagaggaaatcactcaaggttttgaagagacaggggacacgctctatgccccctattccacacattttcagctgcagaaccagcctccccaaaaggaattctccatcccacgggcccacgcttggccgagcccttacaaggactatgaagtaaagaaagagggcagcgctagcaaaggagaagaactcttcactggagttgtcccaattcttgttgaattagatggtgatgttaacggccacaagttctctgtcagtggagagggtgaaggtgatgcaacatacggaaaacttaccctgaagttcatctgcactactggcaaactgcctgttccatggccaacactagtcactactctgtgctatggtgttcaatgcttttcaagatacccggatcatatgaaacggcatgactttttcaagagtgccatgcccgaaggttatgtacaggaaaggaccatcttcttcaaagatgacggcaactacaagacacgtgctgaagtcaagtttgaaggtgatacccttgttaatagaatcgagttaaaaggtattgacttcaaggaagatggcaacattctgggacacaaattggaatacaactataactcacacaatgtatacatcatggcagacaaacaaaagaatggaatcaaagtgaacttcaagacccgccacaacattgaagatggaagcgttcaactagcagaccattatcaacaaaatactccaattggcgatggccctgtccttttaccagacaaccattacctgtccacacaatctgccctttcgaaagatcccaacgaaaagagagaccacatggtccttcttgagtttgtaacagctgctgggattacacatggcatggatgaactgtacaactga

SEQ ID NO: 197 - DNA, 1974 bp, Human
atgctggcagctgcctttgcagactctaactccagcagcatgaatgtgtcctttgctcacctccactttgccggagggtacctgccctctgattcccaggactggagaaccatcatcccggctctcttggtggctgtctgcctggtgggcttcgtgggaaacctgtgtgtgattggcatcctccttcacaatgcttggaaaggaaagccatccatgatccactccctgattctgaatctcagcctggctgatctctccctcctgctgttttctgcacctatccgagctacggcgtactccaaaagtgtttgggatctaggctggtttgtctgcaagtcctctgactggtttatccacacatgcatggcagccaagagcctgacaatcgttgtggtggccaaagtatgcttcatgtatgcaagtgacccagccaagcaagtgagtatccacaactacaccatctggtcagtgctggtggccatctggactgtggctagcctgttacccctgccggaatggttctttagcaccatcaggcatcatgaaggtgtggaaatgtgcctcgtggatgtaccagctgtggctgaagagtttatgtcgatgtttggtaagctctacccactcctggcatttggccttccattattttttgccagcttttatttctggagagcttatgaccaatgtaaaaaacgaggaactaagactcaaaatcttagaaaccagatacgctcaaagcaagtcacagtgatgctgctgagcattgccatcatctctgctctcttgtggctccccgaatgggtagcttggctgtgggtatggcatctgaaggctgcaggcccggccccaccacaaggtttcatagccctgtctcaagtcttgatgttttccatctcttcagcaaatcctctcatttttcttgtgatgtcggaagagttcagggaaggcttgaaaggtgtatggaaatggatgataaccaaaaaacctccaactgtctcagagtctcaggaaacaccagctggcaactcagagggtcttcctgacaaggttccatctccagaatccccagcatccataccagaaaaagagaaacccagctctccctcctctggcaaagggaaaactgagaaggcagagattcccatccttcctgacgtagagcagttttggcatgagagggacacagtcccttctgtacaggacaatgaccctatcccctgggaacatgaagatcaagagacaggggaaggtgttaaaactagcaaaggagaagaactcttcactggagttgtcccaattcttgttgaattagatggtgatgttaacggccacaagttctctgtcagtggagagggtgaaggtgatgcaacatacggaaaacttaccctgaagttcatctgcactactggcaaactgcctgttccatggccaacactagtcactactctgtgctatggtgttcaatgcttttcaagatacccggatcatatgaaacggcatgactttttcaagagtgccatgcccgaaggttatgtacaggaaaggaccatcttcttcaaagatgacggcaactacaagacacgtgctgaagtcaagtttgaaggtgatacccttgttaatagaatcgagttaaaaggtattgacttcaaggaagatggcaacattctgggacacaaattggaatacaactataactcacacaatgtatacatcatggcagacaaacaaaagaatggaatcaaagtgaacttcaagacccgccacaacattgaagatggaagcgttcaactagcagaccattatcaacaaaatactccaattggcgatggccctgtccttttaccagacaaccattacctgtccacacaatctgccctttcgaaagatcccaacgaaaagagagaccacatggtccttcttgagtttgtaacagctgctgggattacacatggcatggatgaactgtacaactga

SEQ ID NO: 198 - DNA, 1974 bp, Human
atgctggcagctgcctttgcagactctaactccagcagcatgaatgtgtcctttgctcacctccactttgccggagggtacctgccctctgattcccaggactggagaaccatcatcccggctctcttggtggctgtctgcctggtgggcttcgtgggaaacctgtgtgtgattggcatcctccttcacaatgcttggaaaggaaagccatccatgatccactccctgattctgaatctcagcctggctgatctctccctcctgctgttttctgcacctatccgagctacggcgtactccaaaagtgtttgggatctaggctggtttgtctgcaagtcctctgactggtttatccacacatgcatggcagccaagagcctgacaatcgttgtggtggccaaagtatgcttcatgtatgcaagtgacccagccaagcaagtgagtatccacaactacaccatctggtcagtgctggtggccatctggactgtggctagcctgttacccctgccggaatggttctttagcaccatcaggcatcatgaaggtgtggaaatgtgcctcgtggatgtaccagctgtggctgaagagtttatgtcgatgtttggtaagctctacccactcctggcatttggccttccattattttttgccagcttttatttctggagagcttatgaccaatgtaaaaaacgaggaactaagactcaaaatcttagaaaccagatacgctcaaagcaagtcacagtgatgctgctgagcattgccatcatctctgctgtcttgtggctccccgaatgggtagcttggctgtgggtatggcatctgaaggctgcaggcccggccccaccacaaggtttcatagccctgtctcaagtcttgatgttttccatctcttcagcaaatcctctcatttttcttgtgatgtcggaagagttcagggaaggcttgaaaggtgtatggaaatggatgataaccaaaaaacctccaactgtctcagagtctcaggaaacaccagctggcaactcagagggtcttcctgacaaggttccatctccagaatccccagcatccataccagaaaaagagaaacccagctctccctcctctggcaaagggaaaactgagaaggcagagattcccatccttcctgacgtagagcagttttggcatgagagggacacagtcccttctgtacaggacaatgaccctatcccctgggaacatgaagatcaagagacaggggaaggtgttaaaactagcaaaggagaagaactcttcactggagttgtcccaattcttgttgaattagatggtgatgttaacggccacaagttctctgtcagtggagagggtgaaggtgatgcaacatacggaaaacttaccctgaagttcatctgcactactggcaaactgcctgttccatggccaacactagtcactactctgtgctatggtgttcaatgcttttcaagatacccggatcatatgaaacggcatgactttttcaagagtgccatgcccgaaggttatgtacaggaaaggaccatcttcttcaaagatgacggcaactacaagacacgtgctgaagtcaagtttgaaggtgatacccttgttaatagaatcgagttaaaaggtattgacttcaaggaagatggcaacattctgggacacaaattggaatacaactataactcacacaatgtatacatcatggcagacaaacaaaagaatggaatcaaagtgaacttcaagacccgccacaacattgaagatggaagcgttcaactagcagaccattatcaacaaaatactccaattggcgatggccctgtccttttaccagacaaccattacctgtccacacaatctgccctttcgaaagatcccaacgaaaagagagaccacatggtccttcttgagtttgtaacagctgctgggattacacatggcatggatgaactgtacaactga

SEQ ID NO: 199 - DNA, 3699 bp, Human
atggtctgttcggctgccccactgctgctcctggccacaactcttcccctgctggggtcaccagttgcccaagcatcccaacctggacagagtcaggctggaggggaatctggatctgggcagctcctggaccaagagaatggagcaggggaatcagcgctggtctccgtctatgtacatctggactttccagataagacctggccccctgaactctccaggacactgactctccctgctgcctcagcttcctcttccccaaggcctcttctcactggcctcagactcacaacagagtgtaatgtcaaccacaaggggaatttctattgtgcttgcctctctggctaccagtggaacaccagcatctgcctccattaccctccttgtcaaagcctccacaaccaccagccttgtggctgccttgtcttcagccatcccgaacccgggtactgccagttgctgccacctgtccccgggatcctcaacctgaactcccagctgcagatgcctggtgacacgctgagcctgactctccatctgagccaggaggccaccaacctgagctggttcctgaggcacccagggagccccagtcccatcctcctgcagccagggacacaggtgtctgtgacttccagccacggccaggctgccctcagcgtctccaacatgtcccatcactgggcaggtgagtacatgagctgcttcgaggcccagggcttcaagtggaacctgtatgaggtggtgagggtgcccttgaaggcgacagatgtggctcgacttccataccagctgtccatctcctgtgccacctcccctggcttccagctgagctgctgcatccccagcacaaacctggcctacaccgcggcctggagccctggagagggcagcaaagcttcctccttcaacgagtcaggctctcagtgctttgtgctggctgttcagcgctgcccgatggctgacaccacgtacacttgtgacctgcagagcctgggcctggctccactcagggtccccatctccatcaccatcatccaggatggagacatcacctgccctgaggacgcctcggtgctcacctggaatgtcaccaaggctggccacgtggcacaggccccatgtcctgagagcaagaggggcatagtgaggaggctctgtggggctgacggagtctgggggccggtccacagcagctgcacagatgcgaggctcctggccttgttcactagaaccaagctgctgcaggcaggccagggcagtcctgctgaggaggtgccacagatcctggcacagctgccagggcaggcggcagaggcaagttcaccctccgacttactgaccctgctgagcaccatgaaatacgtggccaaggtggtggcagaggccagaatacagcttgaccgcagagccctgaagaatctcctgattgccacagacaaggtcctagatatggacaccaggtctctgtggaccctggcccaagcccggaagccctgggcaggctcgactctcctgctggctgtggagaccctggcatgcagcctgtgcccacaggactaccccttcgccttcagcttacccaatgtgctgctgcagagccagctgtttggacccacgtttcctgctgactacagcatctccttccctactcggcccccactgcaggctcagattcccaggcactcactggccccattggtccgtaatggaactgaaataagtattactagcctggtgctgcgaaaactggaccaccttctgccctcaaactatggacaagggctgggggattccctctatgccactcctggcctggtccttgtcatttccatcatggcaggtgaccgggccttcagccagggagaggtcatcatggactttgggaacacagatggttcccctcactgtgtcttctgggatcacagtctcttccagggcagggggggttggtccaaagaagggtgccaggcacaggtggccagtgccagccccactgctcagtgcctctgccagcacctcactgccttctccgtcctcatgtccccacacactgttccggaagaacccgctctggcgctgctgactcaagtgggcttgggagcttccatactggcgctgcttgtgtgcctgggtgtgtactggctggtgtggagagtcgtggtgcggaacaagatctcctatttccgccacgccgccctgctcaacatggtgttctgcttgctggccgcagacacttgcttcctgggcgccccattcctctctccagggccccgaagcccgctctgccttgctgccgccttcctctgtcatttcctctacctggccacctttttctggatgctggcgcaggccctggtgttggcccaccagctgctctttgtctttcaccagctggcaaagcaccgagttctccccctcatggtgctcctgggctacctgtgcccactggggttggcaggtgtcaccctggggctctacctacctcaagggcaatacctgagggagggggaatgctggttggatgggaagggaggggcgttatacaccttcgtggggccagtgctggccatcataggcgtgaatgggctggtactagccatggccatgctgaagttgctgagaccttcgctgtcagagggacccccagcagagaagcgccaagctctgctgggggtgatcaaagccctgctcattcttacacccatctttggcctcacctgggggctgggcctggccactctgttagaggaagtctccacggtccctcattacatcttcaccattctcaacaccctccagggcgtcttcatcctattgtttggttgcctcatggacaggaagatacaagaagctttgcgcaaacgcttctgccgcgcccaagcccccagctccaccatctccctggccacaaatgaaggctgcatcttggaacacagcaaaggaggaagcgacactgccaggaagacagatgcttcagaggctagcaaaggagaagaactcttcactggagttgtcccaattcttgttgaattagatggtgatgttaacggccacaagttctctgtcagtggagagggtgaaggtgatgcaacatacggaaaacttaccctgaagttcatctgcactactggcaaactgcctgttccatggccaacactagtcactactctgtgctatggtgttcaatgcttttcaagatacccggatcatatgaaacggcatgactttttcaagagtgccatgcccgaaggttatgtacaggaaaggaccatcttcttcaaagatgacggcaactacaagacacgtgctgaagtcaagtttgaaggtgatacccttgttaatagaatcgagttaaaaggtattgacttcaaggaagatggcaacattctgggacacaaattggaatacaactataactcacacaatgtatacatcatggcagacaaacaaaagaatggaatcaaagtgaacttcaagacccgccacaacattgaagatggaagcgttcaactagcagaccattatcaacaaaatactccaattggcgatggccctgtccttttaccagacaaccattacctgtccacacaatctgccctttcgaaagatcccaacgaaaagagagaccacatggtccttcttgagtttgtaacagctgctgggattacacatggcatggatgaactgtacaactga

SEQ ID NO: 200 - DNA, 2796 bp, Human
atgactccccagtcgctgctgcagacgacactgttcctgctgagtctgctcttcctggtccaaggtgcccacggcaggggccacagggaagactttcgcttctgcagccagcggaaccagacacacaggagcagcctccactacaaacccacaccagacctgcgcatctccatcgagaactccgaagaggccctcacagtccatgcccctttccctgcagcccaccctgcttcccgatccttccctgaccccaggggcctctaccacttctgcctctactggaaccgacatgctgggagattacatcttctctatggcaagcgtgacttcttgctgagtgacaaagcctctagcctcctctgcttccagcaccaggaggagagcctggctcagggccccccgctgttagccacttctgtcacctcctggtggagccctcagaacatcagcctgcccagtgccgccagcttcaccttctccttccacagtcctccccacacggccgctcacaatgcctcggtggacatgtgcgagctcaaaagggacctccagctgctcagccagttcctgaagcatccccagaaggcctcaaggaggccctcggctgcccccgccagccagcagttgcagagcctggagtcgaaactgacctctgtgagattcatgggggacatggtgtccttcgaggaggaccggatcaacgccacggtgtggaagctccagcccacagccggcctccaggacctgcacatccactcccggcaggaggaggagcagagcgagatcatggagtactcggtgctgctgcctcgaacactcttccagaggacgaaaggccggagcggggaggctgagaagagactcctcctggtggacttcagcagccaagccctgttccaggacaagaattccagccaagtcctgggtgagaaggtcttggggattgtggtacagaacaccaaagtagccaacctcacggagcccgtggtgctcactttccagcaccagctacagccgaagaatgtgactctgcaatgtgtgttctgggttgaagaccccacattgagcagcccggggcattggagcagtgctgggtgtgagaccgtcaggagagaaacccaaacatcctgcttctgcaaccacttgacctactttgcagtgctgatggtctcctcggtggaggtggacgccgtgcacaagcactacctgagcctcctctcctacgtgggctgtgtcgtctctgccctggcctgccttgtcaccattgccgcctacctctgctccagggtgcccctgccgtgcaggaggaaacctcgggactacaccatcaaggtgcacatgaacctgctgctggccgtcttcctgctggacacgagcttcctgctcagcgagccggtggccctgacaggctctgaggctggctgccgagccagtgccatcttcctgcacttctccctgctcacctgcctttcctggatgggcctcgaggggtacaacctctaccgactcgtggtggaggtctttggcacctatgtccctggctacctactcaagctgagcgccatgggctggggcttccccatctttctggtgacgctggtggccctggtggatgtggacaactatggccccatcatcttggctgtgcataggactccagagggcgtcatctacccttccatgtgctggatccgggactccctggtcagctacatcaccaacctgggcctcttcagcctggtgtttctgttcaacatggccatgctagccaccatggtggtgcagatcctgcggctgcgcccccacacccaaaagtggtcacatgtgctgacactgctgggcctcagcctggtccttggcctgccctgggccttgatcttcttctcctttgcttctggcaccttccagcttgtcgtcctctaccttttcagcatcatcacctccttccaaggcttcctcatcttcatctggtactggtccatgcggctgcaggcccggggtggcccctcccctctgaagagcaactcagacagcgccaggctccccatcagctcgggcagcacctcgtccagccgcatctctagcaaaggagaagaactcttcactggagttgtcccaattcttgttgaattagatggtgatgttaacggccacaagttctctgtcagtggagagggtgaaggtgatgcaacatacggaaaacttaccctgaagttcatctgcactactggcaaactgcctgttccatggccaacactagtcactactctgtgctatggtgttcaatgcttttcaagatacccggatcatatgaaacggcatgactttttcaagagtgccatgcccgaaggttatgtacaggaaaggaccatcttcttcaaagatgacggcaactacaagacacgtgctgaagtcaagtttgaaggtgatacccttgttaatagaatcgagttaaaaggtattgacttcaaggaagatggcaacattctgggacacaaattggaatacaactataactcacacaatgtatacatcatggcagacaaacaaaagaatggaatcaaagtgaacttcaagacccgccacaacattgaagatggaagcgttcaactagcagaccattatcaacaaaatactccaattggcgatggccctgtccttttaccagacaaccattacctgtccacacaatctgccctttcgaaagatcccaacgaaaagagagaccacatggtccttcttgagtttgtaacagctgctgggattacacatggcatggatgaactgtacaactga

SEQ ID NO: 201 - DNA, 4755 bp, Human
atgaaatccccaaggagaaccactttgtgcctcatgtttattgtgatttattcttccaaagctgcactgaactggaattacgagtctactattcatcctttgagtcttcatgaacatgaaccagctggtgaagaggcactgaggcaaaaacgagccgttgccacaaaaagtcctacggctgaagaatacactgttaatattgagatcagttttgaaaatgcatccttcctggatcctatcaaagcctacttgaacagcctcagttttccaattcatgggaataacactgaccaaattaccgacattttgagcataaatgtgacaacagtctgcagacctgctggaaatgaaatctggtgctcctgcgagacaggttatgggtggcctcgggaaaggtgtcttcacaatctcatttgtcaagagcgtgacgtcttcctcccagggcaccattgcagttgccttaaagaactgcctcccaatggacctttttgcctgcttcaggaagatgttaccctgaacatgagagtcagactaaatgtaggctttcaagaagacctcatgaacacttcctccgccctctataggtcctacaagaccgacttggaaacagcgttccggaagggttacggaattttaccaggcttcaagggcgtgactgtgacagggttcaagtctggaagtgtggttgtgacatatgaagtcaagactacaccaccatcacttgagttaatacataaagccaatgaacaagttgtacagagcctcaatcagacctacaaaatggactacaactcctttcaagcagttactatcaatgaaagcaatttctttgtcacaccagaaatcatctttgaaggggacacagtcagtctggtgtgtgaaaaggaagttttgtcctccaatgtgtcttggcgctatgaagaacagcagttggaaatccagaacagcagcagattctcgatttacaccgcacttttcaacaacatgacttcggtgtccaagctcaccatccacaacatcactccaggtgatgcaggtgaatatgtttgcaaactgatattagacatttttgaatatgagtgcaagaagaaaatagatgttatgcccatccaaattttggcaaatgaagaaatgaaggtgatgtgcgacaacaatcctgtatctttgaactgctgcagtcagggtaatgttaattggagcaaagtagaatggaagcaggaaggaaaaataaatattccaggaacccctgagacagacatagattctagctgcagcagatacaccctcaaggctgatggaacccagtgcccaagcgggtcgtctggaacaacagtcatctacacttgtgagttcatcagtgcctatggagccagaggcagtgcaaacataaaagtgacattcatctctgtggccaatctaacaataaccccggacccaatttctgtttctgagggacaaaacttttctataaaatgcatcagtgatgtgagtaactatgatgaggtttattggaacacttctgctggaattaaaatataccaaagattttataccacgaggaggtatcttgatggagcagaatcagtactgacagtcaagacctcgaccagggagtggaatggaacctatcactgcatatttagatataagaattcatacagtattgcaaccaaagacgtcattgttcacccgctgcctctaaagctgaacatcatggttgatcctttggaagctactgtttcatgcagtggttcccatcacatcaagtgctgcatagaggaggatggagactacaaagttactttccatatgggttcctcatcccttcctgctgcaaaagaagttaacaaaaaacaagtgtgctacaaacacaatttcaatgcaagctcagtttcctggtgttcaaaaactgttgatgtgtgttgtcactttaccaatgctgctaataattcagtttggagcccatctatgaagctgaatctggttcctggggaaaacatcacatgccaggatcccgtaataggtgtcggagagccggggaaagtcatccagaagctatgccggttctcaaacgttcccagcagccctgagagtcccattggcgggaccatcacttacaaatgtgtaggctcccagtgggaggagaagagaaatgactgcatctctgccccaataaacagtctgctccagatggctaaggctttgatcaagagcccctctcaggatgagatgctccctacatacctgaaggatctttctattagcatagacaaagcggaacatgaaatcagctcttctcctgggagtctgggagccattattaacatccttgatctgctctcaacagttccaacccaagtaaattcagaaatgatgacgcacgtgctctctacggttaatgtcatccttggcaagcccgtcttgaacacctggaaggttttacaacagcaatggaccaatcagagttcacagctactacattcagtggaaagattttcccaagcattacagtcaggagatagccctcctttgtccttctcccaaactaatgtgcagatgagcagcacggtaatcaagtccagccacccagaaacctatcaacagaggtttgttttcccatactttgacctctggggcaatgtggtcattgacaagagctatctagaaaacttgcagtcggattcgtctattgtcaccatggctttcccaactctccaagccatccttgctcaggatatccaggaaaataactttgcagagagcttagtgatgacaaccactgtcagccacaatacgactatgccattcaggatttcaatgacttttaagaacaatagcccttcaggcggcgaaacgaagtgtgtcttctggaacttcaggcttgccaacaacacaggggggtgggacagcagtgggtgctatgttgaagaaggtgatggggacaatgtcacctgtatctgtgaccacctaacatcattctccatcctcatgtcccctgactccccagatcctagttctctcctgggaatactcctggatattatttcttatgttggggtgggcttttccatcttgagcttggcagcctgtctagttgtggaagctgtggtgtggaaatcggtgaccaagaatcggacttcttatatgcgccacacctgcatagtgaatatcgctgcctcccttctggtcgccaacacctggttcattgtggtcgctgccatccaggacaatcgctacatactctgcaagacagcctgtgtggctgccaccttcttcatccacttcttctacctcagcgtcttcttctggatgctgacactgggcctcatgctgttctatcgcctggttttcattctgcatgaaacaagcaggtccactcagaaagccattgccttctgtcttggctatggctgcccacttgccatctcggtcatcacgctgggagccacccagccccgggaagtctatacgaggaagaatgtctgttggctcaactgggaggacaccaaggccctgctggctttcgccatcccagcactgatcattgtggtggtgaacataaccatcactattgtggtcatcaccaagatcctgaggccttccattggagacaagccatgcaagcaggagaagagcagcctgtttcagatcagcaagagcattggggtcctcacaccactcttgggcctcacttggggttttggtctcaccactgtgttcccagggaccaaccttgtgttccatatcatatttgccatcctcaatgtcttccagggattattcattttactctttggatgcctctgggatctgaaggtacaggaagctttgctgaataagttttcattgtcgagatggtcttcacagcactcaaagtcaacatccctgggttcatccacacctgtgttttctatgagttctccaatatcaaggagatttaacaatttgtttggtaaaacaggaacgtataatgtttccaccccagaagcaaccagctcatccctggaaaactcatccagtgcttcttcgttgctcaacgctagcaaaggagaagaactcttcactggagttgtcccaattcttgttgaattagatggtgatgttaacggccacaagttctctgtcagtggagagggtgaaggtgatgcaacatacggaaaacttaccctgaagttcatctgcactactggcaaactgcctgttccatggccaacactagtcactactctgtgctatggtgttcaatgcttttcaagatacccggatcatatgaaacggcatgactttttcaagagtgccatgcccgaaggttatgtacaggaaaggaccatcttcttcaaagatgacggcaactacaagacacgtgctgaagtcaagtttgaaggtgatacccttgttaatagaatcgagttaaaaggtattgacttcaaggaagatggcaacattctgggacacaaattggaatacaactataactcacacaatgtatacatcatggcagacaaacaaaagaatggaatcaaagtgaacttcaagacccgccacaacattgaagatggaagcgttcaactagcagaccattatcaacaaaatactccaattggcgatggccctgtccttttaccagacaaccattacctgtccacacaatctgccctttcgaaagatcccaacgaaaagagagaccacatggtccttcttgagtttgtaacagctgctgggattacacatggcatggatgaactgtacaactga

SEQ ID NO: 202 - DNA, 1938 bp, Human
atgagcctcaactcctccctcagctgcaggaaggagctgagtaatctcactgaggaggagggtggcgaagggggcgtcatcatcacccagttcatcgccatcattgtcatcaccatttttgtctgcctgggaaacctggtcatcgtggtcaccttgtacaagaagtcctacctcctcaccctcagcaacaagttcgtcttcagcctgactctgtccaacttcctgctgtccgtgttggtgctgccttttgtggtgacgagctccatccgcagggaatggatctttggtgtagtgtggtgcaacttctctgccctcctctacctgctgatcagctctgccagcatgctaaccctcggggtcattgccatcgaccgctactatgctgtcctgtaccccatggtgtaccccatgaagatcacagggaaccgggctgtgatggcacttgtctacatctggcttcactcgctcatcggctgcctgccacccctgtttggttggtcatccgtggagtttgacgagttcaaatggatgtgtgtggctgcttggcaccgggagcctggctacacggccttctggcagatctggtgtgccctcttcccctttctggtcatgctggtgtgctatggctttatcttccgcgtggccagggtcaaggcacgcaaggtgcactgtggcacagtcgtcatcgtggaggaggatgctcagaggaccgggaggaagaactccagcacctccacctcctcttcaggcagcaggaggaatgcctttcagggtgtggtctactcggccaaccagtgcaaagccctcatcaccatcctggtggtcctcggtgccttcatggtcacctggggcccctacatggttgtcatcgcctctgaggccctctgggggaaaagctccgtctccccgagcctggagacttgggccacatggctgtcctttgccagcgctgtctgccaccccctgatctatggactctggaacaagacagttcgcaaagaactactgggcatgtgctttggggaccggtattatcgggaaccatttgtgcaacgacagaggacttccaggctcttcagcatttccaacaggatcacagacctgggcctgtccccacacctcactgcgctcatggcaggtggacagcccctggggcacagcagcagcacgggggacactggcttcagctgctcccaggactcaggtaacctgcgtgctttagctagcaaaggagaagaactcttcactggagttgtcccaattcttgttgaattagatggtgatgttaacggccacaagttctctgtcagtggagagggtgaaggtgatgcaacatacggaaaacttaccctgaagttcatctgcactactggcaaactgcctgttccatggccaacactagtcactactctgtgctatggtgttcaatgcttttcaagatacccggatcatatgaaacggcatgactttttcaagagtgccatgcccgaaggttatgtacaggaaaggaccatcttcttcaaagatgacggcaactacaagacacgtgctgaagtcaagtttgaaggtgatacccttgttaatagaatcgagttaaaaggtattgacttcaaggaagatggcaacattctgggacacaaattggaatacaactataactcacacaatgtatacatcatggcagacaaacaaaagaatggaatcaaagtgaacttcaagacccgccacaacattgaagatggaagcgttcaactagcagaccattatcaacaaaatactccaattggcgatggccctgtccttttaccagacaaccattacctgtccacacaatctgccctttcgaaagatcccaacgaaaagagagaccacatggtccttcttgagtttgtaacagctgctgggattacacatggcatggatgaactgtacaactga

SEQ ID NO: 203 - DNA, 1914 bp, Human
atggctcaaagggccttcccgaatccttatgctgattataacaaatccctggccgaaggctactttgatgctgccgggaggctgactcctgagttctcacaacgcttgaccaataagattcgggagcttcttcagcaaatggagagaggcctgaaatcagcagaccctcgggatggcaccggttacactggctgggcaggtattgctgtgctttacttacatctttatgatgtatttggggaccctgcctacctacagttagcacatggctatgtaaagcaaagtctgaactgcttaaccaagcgctccatcaccttcctttgtggggatgcaggccccctggcagtggccgctgtgctatatcacaagatgaacaatgagaagcaggcagaagattgcatcacacggctaattcacctaaataagattgatcctcatgctccaaatgaaatgctctatgggcgaataggctacatctatgctcttctttttgtcaataagaactttggagtggaaaagattcctcaaagccatattcagcagatttgtgaaacaattttaacctctggagaaaacctagctaggaagagaaacttcacggcaaagtctccactgatgtatgaatggtaccaggaatattatgtaggggctgctcatggcctggctggaatttattactacctgatgcagcccagccttcaagtgagccaagggaagttacatagtttggtcaagcccagtgtagactacgtctgccagctgaaattcccttctggcaattaccctccatgtataggtgataatcgagatctgcttgtccattggtgccatggcgcccctggggtaatctacatgctcatccaggcctataaggtattcagagaggaaaagtatctctgtgatgcctatcagtgtgctgatgtgatctggcaatatgggttgctgaagaagggatatgggctgtgccacggttctgcagggaatgcctatgccttcctgacactctacaacctcacacaggacatgaagtacctgtatagggcctgtaagtttgctgaatggtgcttagagtatggagaacatggatgcagaacaccagacacccctttctctctctttgaaggaatggctggaacaatatatttcctggctgacctgctagtccccacaaaagccaggttccctgcatttgaactcgctagcaaaggagaagaactcttcactggagttgtcccaattcttgttgaattagatggtgatgttaacggccacaagttctctgtcagtggagagggtgaaggtgatgcaacatacggaaaacttaccctgaagttcatctgcactactggcaaactgcctgttccatggccaacactagtcactactctgtgctatggtgttcaatgcttttcaagatacccggatcatatgaaacggcatgactttttcaagagtgccatgcccgaaggttatgtacaggaaaggaccatcttcttcaaagatgacggcaactacaagacacgtgctgaagtcaagtttgaaggtgatacccttgttaatagaatcgagttaaaaggtattgacttcaaggaagatggcaacattctgggacacaaattggaatacaactataactcacacaatgtatacatcatggcagacaaacaaaagaatggaatcaaagtgaacttcaagacccgccacaacattgaagatggaagcgttcaactagcagaccattatcaacaaaatactccaattggcgatggccctgtccttttaccagacaaccattacctgtccacacaatctgccctttcgaaagatcccaacgaaaagagagaccacatggtccttcttgagtttgtaacagctgctgggattacacatggcatggatgaactgtacaactga

SEQ ID NO: 204 - DNA, 1842 bp, Human
atggcgaacgcgagcgagccgggtggcagcggcggcggcgaggcggccgccctgggcctcaagctggccacgctcagcctgctgctgtgcgtgagcctagcgggcaacgtgctgttcgcgctgctgatcgtgcgggagcgcagcctgcaccgcgccccgtactacctgctgctcgacctgtgcctggccgacgggctgcgcgcgctcgcctgcctcccggccgtcatgctggcggcgcggcgtgcggcggccgcggcgggggcgccgccgggcgcgctgggctgcaagctgctcgccttcctggccgcgctcttctgcttccacgccgccttcctgctgctgggcgtgggcgtcacccgctacctggccatcgcgcaccaccgcttctatgcagagcgcctggccggctggccgtgcgccgccatgctggtgtgcgccgcctgggcgctggcgctggccgcggccttcccgccagtgctggacggcggtggcgacgacgaggacgcgccgtgcgccctggagcagcggcccgacggcgcccccggcgcgctgggcttcctgctgctgctggccgtggtggtgggcgccacgcacctcgtctacctccgcctgctcttcttcatccacgaccgccgcaagatgcggcccgcgcgcctggtgcccgccgtcagccacgactggaccttccacggcccgggcgccaccggccaggcggccgccaactggacggcgggcttcggccgcgggcccacgccgcccgcgcttgtgggcatccggcccgcagggccgggccgcggcgcgcgccgcctcctcgtgctggaagaattcaagacggagaagaggctgtgcaagatgttctacgccgtcacgctgctcttcctgctcctctgggggccctacgtcgtggccagctacctgcgggtcctggtgcggcccggcgccgtcccccaggcctacctgacggcctccgtgtggctgaccttcgcgcaggccggcatcaaccccgtcgtgtgcttcctcttcaacagggagctgagggactgcttcagggcccagttcccctgctgccagagcccccggaccacccaggcgacccatccctgcgacctgaaaggcattggtttagctagcaaaggagaagaactcttcactggagttgtcccaattcttgttgaattagatggtgatgttaacggccacaagttctctgtcagtggagagggtgaaggtgatgcaacatacggaaaacttaccctgaagttcatctgcactactggcaaactgcctgttccatggccaacactagtcactactctgtgctatggtgttcaatgcttttcaagatacccggatcatatgaaacggcatgactttttcaagagtgccatgcccgaaggttatgtacaggaaaggaccatcttcttcaaagatgacggcaactacaagacacgtgctgaagtcaagtttgaaggtgatacccttgttaatagaatcgagttaaaaggtattgacttcaaggaagatggcaacattctgggacacaaattggaatacaactataactcacacaatgtatacatcatggcagacaaacaaaagaatggaatcaaagtgaacttcaagacccgccacaacattgaagatggaagcgttcaactagcagaccattatcaacaaaatactccaattggcgatggccctgtccttttaccagacaaccattacctgtccacacaatctgccctttcgaaagatcccaacgaaaagagagaccacatggtccttcttgagtttgtaacagctgctgggattacacatggcatggatgaactgtacaactga

SEQ ID NO: 205 - DNA, 3438 bp, Human
atggacacctcccggctcggtgtgctcctgtccttgcctgtgctgctgcagctggcgaccgggggcagctctcccaggtctggtgtgttgctgaggggctgccccacacactgtcattgcgagcccgacggcaggatgttgctcagggtggactgctccgacctggggctctcggagctgccttccaacctcagcgtcttcacctcctacctagacctcagtatgaacaacatcagtcagctgctcccgaatcccctgcccagtctccgcttcctggaggagttacgtcttgcgggaaacgctctgacatacgttcccaagggagcattcactggcctttacagtcttaaagttcttatgctgcagaataatcagctaagacacgtacccacagaagctctgcagaatttgcgaagccttcaatccctgcgtctggatgctaaccacatcagctatgtgcccccaagctgtttcagtggcctgcattccctgaggcacctgtggctggatgacaatgcgttaacagaaatccccgtccaggcttttagaagtttatcggcattgcaagccatgaccttggccctgaacaaaatacaccacataccagactatgcctttggaaacctctccagcttggtagttctacatctccataacaatagaatccactccctgggaaagaaatgctttgatgggctccacagcctagagactttagatttaaattacaataaccttgatgaattccccactgcaattaggacactctccaaccttaaagaactaggatttcatagcaacaatatcaggtcgatacctgagaaagcatttgtaggcaacccttctcttattacaatacatttctatgacaatcccatccaatttgttgggagatctgcttttcaacatttacctgaactaagaacactgactctgaatggtgcctcacaaataactgaatttcctgatttaactggaactgcaaacctggagagtctgactttaactggagcacagatctcatctcttcctcaaaccgtctgcaatcagttacctaatctccaagtgctagatctgtcttacaacctattagaagatttacccagtttttcagtctgccaaaagcttcagaaaattgacctaagacataatgaaatctacgaaattaaagttgacactttccagcagttgcttagcctccgatcgctgaatttggcttggaacaaaattgctattattcaccccaatgcattttccactttgccatccctaataaagctggacctatcgtccaacctcctgtcgtcttttcctataactgggttacatggtttaactcacttaaaattaacaggaaatcatgccttacagagcttgatatcatctgaaaactttccagaactcaaggttatagaaatgccttatgcttaccagtgctgtgcatttggagtgtgtgagaatgcctataagatttctaatcaatggaataaaggtgacaacagcagtatggacgaccttcataagaaagatgctggaatgtttcaggctcaagatgaacgtgaccttgaagatttcctgcttgactttgaggaagacctgaaagcccttcattcagtgcagtgttcaccttccccaggccccttcaaaccctgtgaacacctgcttgatggctggctgatcagaattggagtgtggaccatagcagttctggcacttacttgtaatgctttggtgacttcaacagttttcagatcccctctgtacatttcccccattaaactgttaattggggtcatcgcagcagtgaacatgctcacgggagtctccagtgccgtgctggctggtgtggatgcgttcacttttggcagctttgcacgacatggtgcctggtgggagaatggggttggttgccatgtcattggttttttgtccatttttgcttcagaatcatctgttttcctgcttactctggcagccctggagcgtgggttctctgtgaaatattctgcaaaatttgaaacgaaagctccattttctagcctgaaagtaatcattttgctctgtgccctgctggccttgaccatggccgcagttcccctgctgggtggcagcaagtatggcgcctcccctctctgcctgcctttgccttttggggagcccagcaccatgggctacatggtcgctctcatcttgctcaattccctttgcttcctcatgatgaccattgcctacaccaagctctactgcaatttggacaagggagacctggagaatatttgggactgctctatggtaaaacacattgccctgttgctcttcaccaactgcatcctaaactgccctgtggctttcttgtccttctcctctttaataaaccttacatttatcagtcctgaagtaattaagtttatccttctggtggtagtcccacttcctgcatgtctcaatccccttctctacatcttgttcaatcctcactttaaggaggatctggtgagcctgagaaagcaaacctacgtctggacaagatcaaaacacccaagcttgatgtcaattaactctgatgatgtcgaaaaacagtcctgtgactcaactcaagccttggtaacctttaccagctccagcatcacttatgacctgcctcccagttccgtgccatcaccagcttatccagtgactgagagctgccatctttcctctgtggcatttgtcccatgtctcgctagcaaaggagaagaactcttcactggagttgtcccaattcttgttgaattagatggtgatgttaacggccacaagttctctgtcagtggagagggtgaaggtgatgcaacatacggaaaacttaccctgaagttcatctgcactactggcaaactgcctgttccatggccaacactagtcactactctgtgctatggtgttcaatgcttttcaagatacccggatcatatgaaacggcatgactttttcaagagtgccatgcccgaaggttatgtacaggaaaggaccatcttcttcaaagatgacggcaactacaagacacgtgctgaagtcaagtttgaaggtgatacccttgttaatagaatcgagttaaaaggtattgacttcaaggaagatggcaacattctgggacacaaattggaatacaactataactcacacaatgtatacatcatggcagacaaacaaaagaatggaatcaaagtgaacttcaagacccgccacaacattgaagatggaagcgttcaactagcagaccattatcaacaaaatactccaattggcgatggccctgtccttttaccagacaaccattacctgtccacacaatctgccctttcgaaagatcccaacgaaaagagagaccacatggtccttcttgagtttgtaacagctgctgggattacacatggcatggatgaactgtacaactga

SEQ ID NO: 206 - DNA, 1683 bp, Human
atggattcaaccatcccagtcttgggtacagaactgacaccaatcaacggacgtgaggagactccttgctacaagcagaccctgagcttcacggggctgacgtgcatcgtttcccttgtcgcgctgacaggaaacgcggttgtgctctggctcctgggctgccgcatgcgcaggaacgctgtctccatctacatcctcaacctggtcgcggccgacttcctcttccttagcggccacattatatgttcgccgttacgcctcatcaatatccgccatcccatctccaaaatcctcagtcctgtgatgacctttccctactttataggcctaagcatgctgagcgccatcagcaccgagcgctgcctgtccatcctgtggcccatctggtaccactgccgccgccccagatacctgtcatcggtcatgtgtgtcctgctctgggccctgtccctgctgcggagtatcctggagtggatgttctgtgacttcctgtttagtggtgctgattctgtttggtgtgaaacgtcagatttcattacaatcgcgtggctggtttttttatgtgtggttctctgtgggtccagcctggtcctgctggtcaggattctctgtggatcccggaagatgccgctgaccaggctgtacgtgaccatcctcctcacagtgctggtcttcctcctctgtggcctgccctttggcattcagtgggccctgttttccaggatccacctggattggaaagtcttattttgtcatgtgcatctagtttccattttcctgtccgctcttaacagcagtgccaaccccatcatttacttcttcgtgggctcctttaggcagcgtcaaaataggcagaacctgaagctggttctccagagggctctgcaggacacgcctgaggtggatgaaggtggagggtggcttcctcaggaaaccctggagctgtcgggaagcagattggagcaggctagcaaaggagaagaactcttcactggagttgtcccaattcttgttgaattagatggtgatgttaacggccacaagttctctgtcagtggagagggtgaaggtgatgcaacatacggaaaacttaccctgaagttcatctgcactactggcaaactgcctgttccatggccaacactagtcactactctgtgctatggtgttcaatgcttttcaagatacccggatcatatgaaacggcatgactttttcaagagtgccatgcccgaaggttatgtacaggaaaggaccatcttcttcaaagatgacggcaactacaagacacgtgctgaagtcaagtttgaaggtgatacccttgttaatagaatcgagttaaaaggtattgacttcaaggaagatggcaacattctgggacacaaattggaatacaactataactcacacaatgtatacatcatggcagacaaacaaaagaatggaatcaaagtgaacttcaagacccgccacaacattgaagatggaagcgttcaactagcagaccattatcaacaaaatactccaattggcgatggccctgtccttttaccagacaaccattacctgtccacacaatctgccctttcgaaagatcccaacgaaaagagagaccacatggtccttcttgagtttgtaacagctgctgggattacacatggcatggatgaactgtacaactga

SEQ ID NO: 207 - DNA, 1707 bp, Human
atggatccaaccaccccggcctggggaacagaaagtacaacagtgaatggaaatgaccaagcccttcttctgctttgtggcaaggagaccctgatcccggtcttcctgatccttttcattgccctggtcgggctggtaggaaacgggtttgtgctctggctcctgggcttccgcatgcgcaggaacgccttctctgtctacgtcctcagcctggccggggccgacttcctcttcctctgcttccagattataaattgcctggtgtacctcagtaacttcttctgttccatctccatcaatttccctagcttcttcaccactgtgatgacctgtgcctaccttgcaggcctgagcatgctgagcaccgtcagcaccgagcgctgcctgtccgtcctgtggcccatctggtatcgctgccgccgccccagacacctgtcagcggtcgtgtgtgtcctgctctgggccctgtccctactgctgagcatcttggaagggaagttctgtggcttcttatttagtgatggtgactctggttggtgtcagacatttgatttcatcactgcagcgtggctgatttttttattcatggttctctgtgggtccagtctggccctgctggtcaggatcctctgtggctccaggggtctgccactgaccaggctgtacctgaccatcctgctcacagtgctggtgttcctcctctgcggcctgccctttggcattcagtggttcctaatattatggatctggaaggattctgatgtcttattttgtcatattcatccagtttcagttgtcctgtcatctcttaacagcagtgccaaccccatcatttacttcttcgtgggctcttttaggaagcagtggcggctgcagcagccgatcctcaagctggctctccagagggctctgcaggacattgctgaggtggatcacagtgaaggatgcttccgtcagggcaccccggagatgtcgagaagcagtctggtggctagcaaaggagaagaactcttcactggagttgtcccaattcttgttgaattagatggtgatgttaacggccacaagttctctgtcagtggagagggtgaaggtgatgcaacatacggaaaacttaccctgaagttcatctgcactactggcaaactgcctgttccatggccaacactagtcactactctgtgctatggtgttcaatgcttttcaagatacccggatcatatgaaacggcatgactttttcaagagtgccatgcccgaaggttatgtacaggaaaggaccatcttcttcaaagatgacggcaactacaagacacgtgctgaagtcaagtttgaaggtgatacccttgttaatagaatcgagttaaaaggtattgacttcaaggaagatggcaacattctgggacacaaattggaatacaactataactcacacaatgtatacatcatggcagacaaacaaaagaatggaatcaaagtgaacttcaagacccgccacaacattgaagatggaagcgttcaactagcagaccattatcaacaaaatactccaattggcgatggccctgtccttttaccagacaaccattacctgtccacacaatctgccctttcgaaagatcccaacgaaaagagagaccacatggtccttcttgagtttgtaacagctgctgggattacacatggcatggatgaactgtacaactga

SEQ ID NO: 208 - DNA, 1653 bp, Human
atgatggagcccagagaagctggacagcacgtgggggccgccaacagcgcccaggaggatgtggccttcaacctcatcatcctgtccctcaccgaggggctcggcctcggtgggctgctggggaatggggcagtcctctggctgctcagctccaatgtctacagaaaccccttcgccatctacctcctggacgtggcctgcgcggatctcatcttccttggctgccacatggtggccatcgtccccgacttgctgcaaggccggctggacttcccgggcttcgtgcagaccagcctggcaacgctgcgcttcttctgctacatcgtgggcctgagtctcctggcggccgtcagcgtggagcagtgcctggccgccctcttcccagcctggtactcgtgccgccgcccacgccacctgaccacctgtgtgtgcgccctcacctgggccctctgcctgctgctgcacctgctgctcagcagcgcctgcacccagttcttcggggagcccagccgccacttgtgccggacgctgtggctggtggcagcggtgctgctggctctgctgtgttgcaccatgtgtggggccagccttatgctgctgctgcgggtggagcgaggcccccagcggcccccaccccggggcttccctgggctcatcctcctcaccgtcctcctcttcctcttctgcggcctgcccttcggcatctactggctgtcccggaacctgctctggtacatcccccactacttctaccacttcagcttcctcatggccgccgtgcactgcgcggccaagcccgtcgtctacttctgcctgggcagtgcccagggccgcaggctgcccctccggctggtcctccagcgagcgctgggagacgaggctgagctgggggccgtcagggagacctcccgccggggcctggtggacatagcagccgctagcaaaggagaagaactcttcactggagttgtcccaattcttgttgaattagatggtgatgttaacggccacaagttctctgtcagtggagagggtgaaggtgatgcaacatacggaaaacttaccctgaagttcatctgcactactggcaaactgcctgttccatggccaacactagtcactactctgtgctatggtgttcaatgcttttcaagatacccggatcatatgaaacggcatgactttttcaagagtgccatgcccgaaggttatgtacaggaaaggaccatcttcttcaaagatgacggcaactacaagacacgtgctgaagtcaagtttgaaggtgatacccttgttaatagaatcgagttaaaaggtattgacttcaaggaagatggcaacattctgggacacaaattggaatacaactataactcacacaatgtatacatcatggcagacaaacaaaagaatggaatcaaagtgaacttcaagacccgccacaacattgaagatggaagcgttcaactagcagaccattatcaacaaaatactccaattggcgatggccctgtccttttaccagacaaccattacctgtccacacaatctgccctttcgaaagatcccaacgaaaagagagaccacatggtccttcttgagtttgtaacagctgctgggattacacatggcatggatgaactgtacaactga

SEQ ID NO: 209 - DNA, 1686 bp, Human
atgccactccctgtgcccccagcgggggcacaaaagactcctgaggaccatgtctgtctccatcttgcaggtccctcgccagcaccctctgagccggccaggatgtttgggctgttcggcctctggagaaccttcgacagtgtggtcttctacctgacgctgatcgtgggcctcgggggaccggtaggtaacgggctggtgctctggaacctcggcttccgcatcaagaagggccccttctccatctacctgctgcacctggccgccgccgacttcctgttcctctcctgccgtgtgggcttctccgtggctcaggctgccctgggcgcccaggacacactctacttcgtgctcaccttcctgtggttcgcggtggggctctggctgctggcggccttcagcgtggagcgctgcctctccgacctcttccccgcctgctaccagggctgccggcccagacacgcctcggccgtcctctgcgccctggtgtggaccccgaccctgccggccgtgccgctgcccgccaacgcctgcggcctgctgcgcaacagcgcgtgccccctggtctgcccgcgctaccacgtggccagcgtcacctggttcctggtgctggcccgcgtcgcctggacggctggcgtggtcctctttgtctgggtgacctgctgctccactcgcccgcggcccaggctctacggcatcgtcctgggcgcgctgctcctgctcttcttctgtggcctgccctcggtcttctactggagcctgcagcccctgctgaacttcctgctgcccgtgttttccccgctggccacgctgctggcctgcgtcaacagcagctccaagcccctcatctactcggggttgggccgacagcccgggaagcgggagccgctgaggtcggtactgcggagggccctgggggagggcgccgagctgggtgccaggggacagtccctgcccatgggtctcctagctagcaaaggagaagaactcttcactggagttgtcccaattcttgttgaattagatggtgatgttaacggccacaagttctctgtcagtggagagggtgaaggtgatgcaacatacggaaaacttaccctgaagttcatctgcactactggcaaactgcctgttccatggccaacactagtcactactctgtgctatggtgttcaatgcttttcaagatacccggatcatatgaaacggcatgactttttcaagagtgccatgcccgaaggttatgtacaggaaaggaccatcttcttcaaagatgacggcaactacaagacacgtgctgaagtcaagtttgaaggtgatacccttgttaatagaatcgagttaaaaggtattgacttcaaggaagatggcaacattctgggacacaaattggaatacaactataactcacacaatgtatacatcatggcagacaaacaaaagaatggaatcaaagtgaacttcaagacccgccacaacattgaagatggaagcgttcaactagcagaccattatcaacaaaatactccaattggcgatggccctgtccttttaccagacaaccattacctgtccacacaatctgccctttcgaaagatcccaacgaaaagagagaccacatggtccttcttgagtttgtaacagctgctgggattacacatggcatggatgaactgtacaactga

SEQ ID NO: 210 - DNA, 1776 bp, Human
atggagcacacgcacgcccacctcgcagccaacagctcgctgtcttggtggtcccccggctcggcctgcggcttgggtttcgtgcccgtggtctactacagcctcttgctgtgcctcggtttaccagcaaatatcttgacagtgatcatcctctcccagctggtggcaagaagacagaagtcctcctacaactatctcttggcactcgctgctgccgacatcttggtcctctttttcatagtgtttgtggacttcctgttggaagatttcatcttgaacatgcagatgcctcaggtccccgacaagatcatagaagtgctggaattctcatccatccacacctccatatggattactgtaccgttaaccattgacaggtatatcgctgtctgccacccgctcaagtaccacacggtctcatacccagcccgcacccggaaagtcattgtaagtgtttacatcacctgcttcctgaccagcatcccctattactggtggcccaacatctggactgaagactacatcagcacctctgtgcatcacgtcctcatctggatccactgcttcaccgtctacctggtgccctgctccatcttcttcatcttgaactcaatcattgtgtacaagctcaggaggaagagcaattttcgtctccgtggctactccacggggaagaccaccgccatcttgttcaccattacctccatctttgccacactttgggccccccgcatcatcatgattctttaccacctctatggggcgcccatccagaaccgctggctggtgcacatcatgtccgacattgccaacatgctagcccttctgaacacagccatcaacttcttcctctactgcttcatcagcaagcggttccgcaccatggcagccgccacgctcaaggctttcttcaagtgccagaagcaacctgtacagttctacaccaatcataacttttccataacaagtagcccctggatctcgccggcaaactcacactgcatcaagatgctggtgtaccagtatgacaaaaatggaaaacctataaaagtatccccgtctagcaaaggagaagaactcttcactggagttgtcccaattcttgttgaattagatggtgatgttaacggccacaagttctctgtcagtggagagggtgaaggtgatgcaacatacggaaaacttaccctgaagttcatctgcactactggcaaactgcctgttccatggccaacactagtcactactctgtgctatggtgttcaatgcttttcaagatacccggatcatatgaaacggcatgactttttcaagagtgccatgcccgaaggttatgtacaggaaaggaccatcttcttcaaagatgacggcaactacaagacacgtgctgaagtcaagtttgaaggtgatacccttgttaatagaatcgagttaaaaggtattgacttcaaggaagatggcaacattctgggacacaaattggaatacaactataactcacacaatgtatacatcatggcagacaaacaaaagaatggaatcaaagtgaacttcaagacccgccacaacattgaagatggaagcgttcaactagcagaccattatcaacaaaatactccaattggcgatggccctgtccttttaccagacaaccattacctgtccacacaatctgccctttcgaaagatcccaacgaaaagagagaccacatggtccttcttgagtttgtaacagctgctgggattacacatggcatggatgaactgtacaactga

SEQ ID NO: 211 - DNA, 1791 bp, Human
atgccctctgtgtctccagcggggccctcggccggggcagtccccaatgccaccgcagtgacaacagtgcggaccaatgccagcgggctggaggtgcccctgttccacctgtttgcccggctggacgaggagctgcatggcaccttcccaggcctgtggctggcgctgatggcggtgcacggagccatcttcctggcagggctggtgctcaacgggctggcgctgtacgtcttctgctgccgcacccgggccaagacaccctcagtcatctacaccatcaacctggtggtgaccgatctactggtagggctgtccctgcccacgcgcttcgctgtgtactacggcgccaggggctgcctgcgctgtgccttcccgcacgtcctcggttacttcctcaacatgcactgctccatcctcttcctcacctgcatctgcgtggaccgctacctggccatcgtgcggcctgaaggctcccgccgctgccgccagcctgcctgtgccagggccgtgtgcgccttcgtgtggctggccgccggtgccgtcaccctgtcggtgctgggcgtgacaggcagccggccctgctgccgtgtctttgcgctgactgtcctggagttcctgctgcctctgctggtcatcagcgtgtttaccggccgcatcatgtgtgcactgtcgcggccgggtctgctccgccagggtcgccagcgccgcgtgcgggccatgcagctcctgctcacggtgctcatcatctttctcgtctgcttcacgcccttccacgcccgccaagtggccgtggcgctgtggcccgacatgccacaccacacgagcctcgtggtctaccacgtggccgtgaccctcagcagcctcaacagctgcatggaccccatcgtctactgcttcgtcaccagtggcttccaggccaccgtccgaggcctcttcggccagcacggagagcgtgagcccagcagcggtgacgtggtcagcatgcacaggagctccaagggctcaggccgtcatcacatcctcagtgccggccctcacgccctcacccaggccctggctaatgggcccgaggctgctagcaaaggagaagaactcttcactggagttgtcccaattcttgttgaattagatggtgatgttaacggccacaagttctctgtcagtggagagggtgaaggtgatgcaacatacggaaaacttaccctgaagttcatctgcactactggcaaactgcctgttccatggccaacactagtcactactctgtgctatggtgttcaatgcttttcaagatacccggatcatatgaaacggcatgactttttcaagagtgccatgcccgaaggttatgtacaggaaaggaccatcttcttcaaagatgacggcaactacaagacacgtgctgaagtcaagtttgaaggtgatacccttgttaatagaatcgagttaaaaggtattgacttcaaggaagatggcaacattctgggacacaaattggaatacaactataactcacacaatgtatacatcatggcagacaaacaaaagaatggaatcaaagtgaacttcaagacccgccacaacattgaagatggaagcgttcaactagcagaccattatcaacaaaatactccaattggcgatggccctgtccttttaccagacaaccattacctgtccacacaatctgccctttcgaaagatcccaacgaaaagagagaccacatggtccttcttgagtttgtaacagctgctgggattacacatggcatggatgaactgtacaactga

SEQ ID NO: 212 - DNA, 1632 bp, Human
atgcctggccacaatacctccaggaattcctcttgcgatcctatagtgacaccccacttaatcagcctctacttcatagtgcttattggcgggctggtgggtgtcatttccattcttttcctcctggtgaaaatgaacacccggtcagtgaccaccatggcggtcattaacttggtggtggtccacagcgtttttctgctgacagtgccatttcgcttgacctacctcatcaagaagacttggatgtttgggctgcccttctgcaaatttgtgagtgccatgctgcacatccacatgtacctcacgttcctattctatgtggtgatcctggtcaccagatacctcatcttcttcaagtgcaaagacaaagtggaattctacagaaaactgcatgctgtggctgccagtgctggcatgtggacgctggtgattgtcattgtggtacccctggttgtctcccggtatggaatccatgaggaatacaatgaggagcactgttttaaatttcacaaagagcttgcttacacatatgtgaaaatcatcaactatatgatagtcatttttgtcatagccgttgctgtgattctgttggtcttccaggtcttcatcattatgttgatggtgcagaagctacgccactctttactatcccaccaggagttctgggctcagctgaaaaacctattttttataggggtcatccttgtttgtttccttccctaccagttctttaggatctattacttgaatgttgtgacgcattccaatgcctgtaacagcaaggttgcattttataacgaaatcttcttgagtgtaacagcaattagctgctatgatttgcttctctttgtctttgggggaagccattggtttaagcaaaagataattggcttatggaattgtgttttgtgccgtgctagcaaaggagaagaactcttcactggagttgtcccaattcttgttgaattagatggtgatgttaacggccacaagttctctgtcagtggagagggtgaaggtgatgcaacatacggaaaacttaccctgaagttcatctgcactactggcaaactgcctgttccatggccaacactagtcactactctgtgctatggtgttcaatgcttttcaagatacccggatcatatgaaacggcatgactttttcaagagtgccatgcccgaaggttatgtacaggaaaggaccatcttcttcaaagatgacggcaactacaagacacgtgctgaagtcaagtttgaaggtgatacccttgttaatagaatcgagttaaaaggtattgacttcaaggaagatggcaacattctgggacacaaattggaatacaactataactcacacaatgtatacatcatggcagacaaacaaaagaatggaatcaaagtgaacttcaagacccgccacaacattgaagatggaagcgttcaactagcagaccattatcaacaaaatactccaattggcgatggccctgtccttttaccagacaaccattacctgtccacacaatctgccctttcgaaagatcccaacgaaaagagagaccacatggtccttcttgagtttgtaacagctgctgggattacacatggcatggatgaactgtacaactga

SEQ ID NO: 213 - DNA, 1734 bp, Human
atgaatgagccactagactatttagcaaatgcttctgatttccccgattatgcagctgcttttggaaattgcactgatgaaaacatcccactcaagatgcactacctccctgttatttatggcattatcttcctcgtgggatttccaggcaatgcagtagtgatatccacttacattttcaaaatgagaccttggaagagcagcaccatcattatgctgaacctggcctgcacagatctgctgtatctgaccagcctccccttcctgattcactactatgccagtggcgaaaactggatctttggagatttcatgtgtaagtttatccgcttcagcttccatttcaacctgtatagcagcatcctcttcctcacctgtttcagcatcttccgctactgtgtgatcattcacccaatgagctgcttttccattcacaaaactcgatgtgcagttgtagcctgtgctgtggtgtggatcatttcactggtagctgtcattccgatgaccttcttgatcacatcaaccaacaggaccaacagatcagcctgtctcgacctcaccagttcggatgaactcaatactattaagtggtacaacctgattttgactgcaactactttctgcctccccttggtgatagtgacactttgctataccacgattatccacactctgacccatggactgcaaactgacagctgccttaagcagaaagcacgaaggctaaccattctgctactccttgcattttacgtatgttttttacccttccatatcttgagggtcattcggatcgaatctcgcctgctttcaatcagttgttccattgagaatcagatccatgaagcttacatcgtttctagaccattagctgctctgaacacctttggtaacctgttactatatgtggtggtcagcgacaactttcagcaggctgtctgctcaacagtgagatgcaaagtaagcgggaaccttgagcaagcaaagaaaattagttactcaaacaaccctgctagcgctagcaaaggagaagaactcttcactggagttgtcccaattcttgttgaattagatggtgatgttaacggccacaagttctctgtcagtggagagggtgaaggtgatgcaacatacggaaaacttaccctgaagttcatctgcactactggcaaactgcctgttccatggccaacactagtcactactctgtgctatggtgttcaatgcttttcaagatacccggatcatatgaaacggcatgactttttcaagagtgccatgcccgaaggttatgtacaggaaaggaccatcttcttcaaagatgacggcaactacaagacacgtgctgaagtcaagtttgaaggtgatacccttgttaatagaatcgagttaaaaggtattgacttcaaggaagatggcaacattctgggacacaaattggaatacaactataactcacacaatgtatacatcatggcagacaaacaaaagaatggaatcaaagtgaacttcaagacccgccacaacattgaagatggaagcgttcaactagcagaccattatcaacaaaatactccaattggcgatggccctgtccttttaccagacaaccattacctgtccacacaatctgccctttcgaaagatcccaacgaaaagagagaccacatggtccttcttgagtttgtaacagctgctgggattacacatggcatggatgaactgtacaactga

SEQ ID NO: 214 - DNA, 1710 bp, Human
atgatcaccctgaacaatcaagatcaacctgtcccttttaacagctcacatccagatgaatacaaaattgcagcccttgtcttctatagctgtatcttcataattggattatttgttaacatcactgcattatgggttttcagttgtaccaccaagaagagaaccacggtaaccatctatatgatgaatgtggcattagtggacttgatatttataatgactttaccctttcgaatgttttattatgcaaaagatgaatggccatttggagagtacttctgccagattcttggagctctcacagtgttttacccaagcattgctttatggcttcttgcctttattagtgctgacagatacatggccattgtacagccgaagtacgccaaagaacttaaaaacacgtgcaaagccgtgctggcgtgtgtgggagtctggataatgaccctgaccacgaccacccctctgctactgctctataaagacccagataaagactccactcccgccacctgcctcaagatttctgacatcatctatctaaaagctgtgaacgtgctgaacctcactcgactgacattttttttcttgattcctttgttcatcatgattgggtgctacttggtcattattcataatctccttcacggcaggacgtctaagctgaaacccaaagtcaaggagaagtccataaggatcatcatcacgctgctggtgcaggtgctcgtctgctttatgcccttccacatctgtttcgctttcctgatgctgggaacgggggagaacagttacaatccctggggagcctttaccaccttcctcatgaacctcagcacgtgtctggatgtgattctctactacatcgtttcaaaacaatttcaggctcgagtcattagtgtcatgctataccgtaattaccttcgaagcatgcgcagaaaaagtttccgatctggtagtctacggtcactaagcaatataaacagtgaaatgttagctagcaaaggagaagaactcttcactggagttgtcccaattcttgttgaattagatggtgatgttaacggccacaagttctctgtcagtggagagggtgaaggtgatgcaacatacggaaaacttaccctgaagttcatctgcactactggcaaactgcctgttccatggccaacactagtcactactctgtgctatggtgttcaatgcttttcaagatacccggatcatatgaaacggcatgactttttcaagagtgccatgcccgaaggttatgtacaggaaaggaccatcttcttcaaagatgacggcaactacaagacacgtgctgaagtcaagtttgaaggtgatacccttgttaatagaatcgagttaaaaggtattgacttcaaggaagatggcaacattctgggacacaaattggaatacaactataactcacacaatgtatacatcatggcagacaaacaaaagaatggaatcaaagtgaacttcaagacccgccacaacattgaagatggaagcgttcaactagcagaccattatcaacaaaatactccaattggcgatggccctgtccttttaccagacaaccattacctgtccacacaatctgccctttcgaaagatcccaacgaaaagagagaccacatggtccttcttgagtttgtaacagctgctgggattacacatggcatggatgaactgtacaactga

SEQ ID NO: 215 - DNA, 2364 bp, Human
atggcgacgcccaggggcctgggggccctgctcctgctcctcctgctcccgacctcaggtcaggaaaagcccaccgaagggccaagaaacacctgcctggggagcaacaacatgtacgacatcttcaacttgaatgacaaggctttgtgcttcaccaagtgcaggcagtcgggcagcgactcctgcaatgtggaaaacttgcagagatactggctaaactacgaggcccatctgatgaaggaaggtttgacgcagaaggtgaacacgcctttcctgaaggctttggtccagaacctcagcaccaacactgcagaagacttctatttctctctggagccctctcaggttccgaggcaggtgatgaaggacgaggacaagccccctgacagagtgcgacttcccaagagcctttttcgatccctgccaggcaacaggtctgtggtccgcttggccgtcaccattctggacattggtccagggactctcttcaagggcccccggctcggcctgggagatggcagcggcgtgttgaacaatcgcctggtgggtttgagtgtgggacaaatgcatgtcaccaagctggctgagcctctggagatcgtcttctctcaccagcgaccgccccctaacatgaccctcacctgtgtattctgggatgtgactaaagggaccactggagactggtcttctgagggctgctccacggaggtcagacctgaggggaccgtgtgctgctgtgaccacctgacctttttcgccctgctcctgagacccaccttggaccagtccacggtgcatatcctcacacgcatctcccaggcgggctgtggggtctccatgatcttcctggccttcaccattattctttatgcctttctgaggctttcccgggagaggttcaagtcagaagatgccccaaagatccacgtggccctgggtggcagcctgttcctcctgaatctggccttcttggtcaatgtggggagtggctcaaaggggtctgatgctgcctgctgggcccggggggctgtcttccactacttcctgctctgtgccttcacctggatgggccttgaagccttccacctctacctgctcgctgtcagggtcttcaacacctacttcgggcactacttcctgaagctgagcctggtgggctggggcctgcccgccctgatggtcatcggcactgggagtgccaacagctacggcctctacaccatccgtgatagggagaaccgcacctctctggagctatgctggttccgtgaagggacaaccatgtacgccctctatatcaccgtccacggctacttcctcatcaccttcctctttggcatggtggtcctggccctggtggtctggaagatcttcaccctgtcccgtgctacagcggtcaaggagcgggggaagaaccggaagaaggtgctcaccctgctgggcctctcgagcctggtgggtgtgacatgggggttggccatcttcaccccgttgggcctctccaccgtctacatctttgcacttttcaactccttgcaaggtgtcttcatctgctgctggttcaccatcctttacctcccaagtcagagcaccacagtctcctcctctactgcaagattggaccaggcccactccgcatctcaagaagctagcaaaggagaagaactcttcactggagttgtcccaattcttgttgaattagatggtgatgttaacggccacaagttctctgtcagtggagagggtgaaggtgatgcaacatacggaaaacttaccctgaagttcatctgcactactggcaaactgcctgttccatggccaacactagtcactactctgtgctatggtgttcaatgcttttcaagatacccggatcatatgaaacggcatgactttttcaagagtgccatgcccgaaggttatgtacaggaaaggaccatcttcttcaaagatgacggcaactacaagacacgtgctgaagtcaagtttgaaggtgatacccttgttaatagaatcgagttaaaaggtattgacttcaaggaagatggcaacattctgggacacaaattggaatacaactataactcacacaatgtatacatcatggcagacaaacaaaagaatggaatcaaagtgaacttcaagacccgccacaacattgaagatggaagcgttcaactagcagaccattatcaacaaaatactccaattggcgatggccctgtccttttaccagacaaccattacctgtccacacaatctgccctttcgaaagatcccaacgaaaagagagaccacatggtccttcttgagtttgtaacagctgctgggattacacatggcatggatgaactgtacaactga

SEQ ID NO: 216 - DNA, 1827 bp, Human
atgggtgacagaagattcattgacttccaattccaagattcaaattcaagcctcagacccaggttgggcaatgctactgccaataatacttgcattgttgatgattccttcaagtataatctcaatggtgctgtctacagtgttgtattcatcttgggtctgataaccaacagtgtctctctgtttgtcttctgtttccgcatgaaaatgagaagtgagactgctatttttatcaccaatctagctgtctctgatttgctttttgtctgtacactaccttttaaaatattttacaacttcaaccgccactggccttttggtgacaccctctgcaagatctctggaactgcattccttaccaacatctatgggagcatgctctttctcacctgtattagtgtggatcgtttcctggccattgtctatccttttcgatctcgtactattaggactaggaggaattctgccattgtgtgtgctggtgtctggatcctagtcctcagtggcggtatttcagcctctttgttttccaccactaatgtcaacaatgcaaccaccacctgctttgaaggcttctccaaacgtgtctggaagacttatttatccaagatcacaatatttattgaagttgttgggtttatcattcctctaatattgaatgtctcttgctcttctgtggtgctgagaactcttcgcaagcctgctactctgtctcaaattgggaccaataagaaaaaagtactgaaaatgatcacagtacatatggcagtctttgtggtatgctttgtaccctacaactctgtcctcttcttgtatgccctggtgcgctcccaagctattactaattgctttttggaaagatttgcaaagatcatgtacccaatcaccttgtgccttgcaactctgaactgttgttttgaccctttcatctattacttcacccttgaatcctttcagaagtccttctacatcaatgcccacatcagaatggagtccctgtttaagactgaaacacctttgaccacaaagccttcccttccagctattcaagaggaagtgagtgatcaaacaacaaataatggtggtgaattaatgctagaatccacctttgctagcaaaggagaagaactcttcactggagttgtcccaattcttgttgaattagatggtgatgttaacggccacaagttctctgtcagtggagagggtgaaggtgatgcaacatacggaaaacttaccctgaagttcatctgcactactggcaaactgcctgttccatggccaacactagtcactactctgtgctatggtgttcaatgcttttcaagatacccggatcatatgaaacggcatgactttttcaagagtgccatgcccgaaggttatgtacaggaaaggaccatcttcttcaaagatgacggcaactacaagacacgtgctgaagtcaagtttgaaggtgatacccttgttaatagaatcgagttaaaaggtattgacttcaaggaagatggcaacattctgggacacaaattggaatacaactataactcacacaatgtatacatcatggcagacaaacaaaagaatggaatcaaagtgaacttcaagacccgccacaacattgaagatggaagcgttcaactagcagaccattatcaacaaaatactccaattggcgatggccctgtccttttaccagacaaccattacctgtccacacaatctgccctttcgaaagatcccaacgaaaagagagaccacatggtccttcttgagtttgtaacagctgctgggattacacatggcatggatgaactgtacaactga

SEQ ID NO: 217 - DNA, 1734 bp, Human
atggctaaccttgacaaatacactgaaacattcaagatgggtagcaacagtaccagcactgctgagatttactgtaatgtcactaatgtgaaatttcaatactccctctatgcaaccacctatatcctcatattcattcctggtcttctggctaacagtgcagccttgtgggttctgtgccgcttcatcagcaagaaaaataaagccatcattttcatgatcaacctctctgtggctgaccttgctcatgtattatctttacccctccggatttactattacatcagccaccactggcctttccagagagccctttgcctgctctgcttctacctgaagtatctcaacatgtatgccagcatttgtttcctgacgtgcatcagtcttcaaaggtgcttttttctcctcaagcccttcagggccagagactggaagcgtaggtacgatgtgggcatcagtgctgccatctggatcgttgtggggactgcctgtttgccatttcccatcctgagaagcacagacttaaacaacaacaagtcctgctttgctgatcttggatacaagcaaatgaatgcagttgcgttggtcgggatgattacagttgctgagcttgcaggatttgtgatcccagtgatcatcatcgcatggtgtacctggaaaactactatatccttgagacagccaccaatggctttccaagggatcagtgagaggcagaaagcactgcggatggtgttcatgtgtgctgcagtcttcttcatctgcttcactccctatcatattaactttattttttacaccatggtaaaggaaaccatcattagcagttgtcccgttgtccgaatcgcactgtatttccaccctttttgcctgtgccttgcaagtctctgctgccttttggatccaattctttattactttatggcttcagagtttcgtgaccaactatcccgccatggcagttctgtgacccgctcccgcctcatgagcaaggagagtggttcatcaatgattggctctagcaaaggagaagaactcttcactggagttgtcccaattcttgttgaattagatggtgatgttaacggccacaagttctctgtcagtggagagggtgaaggtgatgcaacatacggaaaacttaccctgaagttcatctgcactactggcaaactgcctgttccatggccaacactagtcactactctgtgctatggtgttcaatgcttttcaagatacccggatcatatgaaacggcatgactttttcaagagtgccatgcccgaaggttatgtacaggaaaggaccatcttcttcaaagatgacggcaactacaagacacgtgctgaagtcaagtttgaaggtgatacccttgttaatagaatcgagttaaaaggtattgacttcaaggaagatggcaacattctgggacacaaattggaatacaactataactcacacaatgtatacatcatggcagacaaacaaaagaatggaatcaaagtgaacttcaagacccgccacaacattgaagatggaagcgttcaactagcagaccattatcaacaaaatactccaattggcgatggccctgtccttttaccagacaaccattacctgtccacacaatctgccctttcgaaagatcccaacgaaaagagagaccacatggtccttcttgagtttgtaacagctgctgggattacacatggcatggatgaactgtacaactga

SEQ ID NO: 218 - DNA, 2556 bp, Human
atgcgagccccgggcgcgcttctcgcccgcatgtcgcggctactgcttctgctactgctcaaggtgtctgcctcttctgccctcggggtcgcccctgcgtccagaaacgaaacttgtctgggggagagctgtgcacctacagtgatccagcgccgcggcagggacgcctggggaccgggaaattctgcaagagacgttctgcgagcccgagcacccagggaggagcagggggcagcgtttcttgcgggaccctcctgggacctgccggcggccccgggccgtgacccggctgcaggcagaggggcggaggcgtcggcagccggacccccgggacctccaaccaggccacctggcccctggaggtggaaaggtgctcggggtcaggagccttctgaaactttggggagagggaaccccacggccctccagctcttccttcagatctcagaggaggaagagaagggtcccagaggcgctggcatttccgggcgtagccaggagcagagtgtgaagacagtccccggagccagcgatcttttttactggccaaggagagccgggaaactccagggttcccaccacaagcccctgtccaagacggccaatggactggcggggcacgaagggtggacaattgcactcccgggccgggcgctggcccagaatggatccttgggtgaaggaatccatgagcctgggggtccccgccggggaaacagcacgaaccggcgtgtgagactgaagaaccccttctacccgctgacccaggagtcctatggagcctacgcggtcatgtgtctgtccgtggtgatcttcgggaccggcatcattggcaacctggcggtgatgtgcatcgtgtgccacaactactacatgcggagcatctccaactccctcttggccaacctggccttctgggactttctcatcatcttcttctgccttccgctggtcatcttccacgagctgaccaagaagtggctgctggaggacttctcctgcaagatcgtgccctatatagaggtcgcttctctgggagtcaccactttcaccttatgtgctctgtgcatagaccgcttccgtgctgccaccaacgtacagatgtactacgaaatgatcgaaaactgttcctcaacaactgccaaacttgctgttatatgggtgggagctctattgttagcacttccagaagttgttctccgccagctgagcaaggaggatttggggtttagtggccgagctccggcagaaaggtgcattattaagatctctcctgatttaccagacaccatctatgttctagccctcacctacgacagtgcgagactgtggtggtattttggctgttacttttgtttgcccacgcttttcaccatcacctgctctctagtgactgcgaggaaaatccgcaaagcagagaaagcctgtacccgagggaataaacggcagattcaactagagagtcagatgaactgtacagtagtggcactgaccattttatatggattttgcattattcctgaaaatatctgcaacattgttactgcctacatggctacaggggtttcacagcagacaatggacctccttaatatcatcagccagttccttttgttctttaagtcctgtgtcaccccagtcctccttttctgtctctgcaaacccttcagtcgggccttcatggagtgctgctgctgttgctgtgaggaatgcattcagaagtcttcaacggtgaccagtgatgacaatgacaacgagtacaccacggaactcgaactctcgcctttcagtaccatacgccgtgaaatgtccacttttgcttctgtcggaactcattgcgctagcaaaggagaagaactcttcactggagttgtcccaattcttgttgaattagatggtgatgttaacggccacaagttctctgtcagtggagagggtgaaggtgatgcaacatacggaaaacttaccctgaagttcatctgcactactggcaaactgcctgttccatggccaacactagtcactactctgtgctatggtgttcaatgcttttcaagatacccggatcatatgaaacggcatgactttttcaagagtgccatgcccgaaggttatgtacaggaaaggaccatcttcttcaaagatgacggcaactacaagacacgtgctgaagtcaagtttgaaggtgatacccttgttaatagaatcgagttaaaaggtattgacttcaaggaagatggcaacattctgggacacaaattggaatacaactataactcacacaatgtatacatcatggcagacaaacaaaagaatggaatcaaagtgaacttcaagacccgccacaacattgaagatggaagcgttcaactagcagaccattatcaacaaaatactccaattggcgatggccctgtccttttaccagacaaccattacctgtccacacaatctgccctttcgaaagatcccaacgaaaagagagaccacatggtccttcttgagtttgtaacagctgctgggattacacatggcatggatgaactgtacaactga

SEQ ID NO: 219 - DNA, 2160 bp, Human
atgcggtggctgtggcccctggctgtctctcttgctgtgattttggctgtggggctaagcagggtctctgggggtgcccccctgcacctgggcaggcacagagccgagacccaggagcagcagagccgatccaagaggggcaccgaggatgaggaggccaagggcgtgcagcagtatgtgcctgaggagtgggcggagtacccccggcccattcaccctgctggcctgcagccaaccaagcccttggtggccaccagccctaaccccgacaaggatgggggcaccccagacagtgggcaggaactgaggggcaatctgacaggggcaccagggcagaggctacagatccagaaccccctgtatccggtgaccgagagctcctacagtgcctatgccatcatgcttctggcgctggtggtgtttgcggtgggcattgtgggcaacctgtcggtcatgtgcatcgtgtggcacagctactacctgaagagcgcctggaactccatccttgccagcctggccctctgggattttctggtcctctttttctgcctccctattgtcatcttcaacgagatcaccaagcagaggctactgggtgacgtttcttgtcgtgccgtgcccttcatggaggtctcctctctgggagtcacgactttcagcctctgtgccctgggcattgaccgcttccacgtggccaccagcaccctgcccaaggtgaggcccatcgagcggtgccaatccatcctggccaagttggctgtcatctgggtgggctccatgacgctggctgtgcctgagctcctgctgtggcagctggcacaggagcctgcccccaccatgggcaccctggactcatgcatcatgaaaccctcagccagcctgcccgagtccctgtattcactggtgatgacctaccagaacgcccgcatgtggtggtactttggctgctacttctgcctgcccatcctcttcacagtcacctgccagctggtgacatggcgggtgcgaggccctccagggaggaagtcagagtgcagggccagcaagcacgagcagtgtgagagccagctcaacagcaccgtggtgggcctgaccgtggtctacgccttctgcaccctcccagagaacgtctgcaacatcgtggtggcctacctctccaccgagctgacccgccagaccctggacctcctgggcctcatcaaccagttctccaccttcttcaagggcgccatcaccccagtgctgctcctttgcatctgcaggccgctgggccaggccttcctggactgctgctgctgctgctgctgtgaggagtgcggcggggcttcggaggcctctgctgccaatgggtcggacaacaagctcaagaccgaggtgtcctcttccatctacttccacaagcccagggagtcacccccactcctgcccctgggcacaccttgcgctagcaaaggagaagaactcttcactggagttgtcccaattcttgttgaattagatggtgatgttaacggccacaagttctctgtcagtggagagggtgaaggtgatgcaacatacggaaaacttaccctgaagttcatctgcactactggcaaactgcctgttccatggccaacactagtcactactctgtgctatggtgttcaatgcttttcaagatacccggatcatatgaaacggcatgactttttcaagagtgccatgcccgaaggttatgtacaggaaaggaccatcttcttcaaagatgacggcaactacaagacacgtgctgaagtcaagtttgaaggtgatacccttgttaatagaatcgagttaaaaggtattgacttcaaggaagatggcaacattctgggacacaaattggaatacaactataactcacacaatgtatacatcatggcagacaaacaaaagaatggaatcaaagtgaacttcaagacccgccacaacattgaagatggaagcgttcaactagcagaccattatcaacaaaatactccaattggcgatggccctgtccttttaccagacaaccattacctgtccacacaatctgccctttcgaaagatcccaacgaaaagagagaccacatggtccttcttgagtttgtaacagctgctgggattacacatggcatggatgaactgtacaactga

SEQ ID NO: 220 - DNA, 1776 bp, Human
atggaaaccaacttctccattcctctgaatgaaactgaggaggtgctccctgagcctgctggccacaccgttctgtggatcttctcattgctagtccacggagtcacctttgtcttcggggtcctgggcaatgggcttgtgatctgggtggctggattccggatgacacgcacagtcaacaccatctgttacctgaacctggccctagctgacttctctttcagtgccatcctaccattccgaatggtctcagtcgccatgagagaaaaatggccttttggctcattcctatgtaagttagttcatgttatgatagacatcaacctgtttgtcagtgtctacctgatcaccatcattgctctggaccgctgtatttgtgtcctgcatccagcctgggcccagaaccatcgcaccatgagtctggccaagagggtgatgacgggactctggattttcaccatagtccttaccttaccaaatttcatcttctggactacaataagtactacgaatggggacacatactgtattttcaactttgcattctggggtgacactgctgtagagaggttgaacgtgttcattaccatggccaaggtctttctgatcctccacttcattattggcttcagcgtgcctatgtccatcatcacagtctgctatgggatcatcgctgccaaaattcacagaaaccacatgattaaatccagccgtcccttacgtgtcttcgctgctgtggtggcttctttcttcatctgttggttcccttatgaactaattggcattctaatggcagtctggctcaaagagatgttgttaaatggcaaatacaaaatcattcttgtcctgattaacccaacaagctccttggccttttttaacagctgcctcaacccaattctctacgtctttatgggtcgtaacttccaagaaagactgattcgctctttgcccactagtttggagagggccctgactgaggtccctgactcagcccagaccagcaacacagacaccacttctgcttcacctcctgaggagacggagttacaagcaatggctagcaaaggagaagaactcttcactggagttgtcccaattcttgttgaattagatggtgatgttaacggccacaagttctctgtcagtggagagggtgaaggtgatgcaacatacggaaaacttaccctgaagttcatctgcactactggcaaactgcctgttccatggccaacactagtcactactctgtgctatggtgttcaatgcttttcaagatacccggatcatatgaaacggcatgactttttcaagagtgccatgcccgaaggttatgtacaggaaaggaccatcttcttcaaagatgacggcaactacaagacacgtgctgaagtcaagtttgaaggtgatacccttgttaatagaatcgagttaaaaggtattgacttcaaggaagatggcaacattctgggacacaaattggaatacaactataactcacacaatgtatacatcatggcagacaaacaaaagaatggaatcaaagtgaacttcaagacccgccacaacattgaagatggaagcgttcaactagcagaccattatcaacaaaatactccaattggcgatggccctgtccttttaccagacaaccattacctgtccacacaatctgccctttcgaaagatcccaacgaaaagagagaccacatggtccttcttgagtttgtaacagctgctgggattacacatggcatggatgaactgtacaactga

SEQ ID NO: 221 - DNA, 1785 bp, Human
atgaatggggtctcggaggggaccagaggctgcagtgacaggcaacctggggtcctgacacgtgatcgctcttgttccaggaagatgaactcttccggatgcctgtctgaggaggtggggtccctccgcccactgactgtggttatcctgtctgcgtccattgtcgtcggagtgctgggcaatgggctggtgctgtggatgactgtcttccgtatggcacgcacggtctccaccgtctgcttcttccacctggcccttgccgatttcatgctctcactgtctctgcccattgccatgtactatattgtctccaggcagtggctcctcggagagtgggcctgcaaactctacatcacctttgtgttcctcagctactttgccagtaactgcctccttgtcttcatctctgtggaccgttgcatctctgtcctctaccccgtctgggccctgaaccaccgcactgtgcagcgggcgagctggctggcctttggggtgtggctcctggccgccgccttgtgctctgcgcacctgaaattccggacaaccagaaaatggaatggctgtacgcactgctacttggcgttcaactctgacaatgagactgcccagatttggattgaaggggtcgtggagggacacattatagggaccattggccacttcctgctgggcttcctggggcccttagcaatcataggcacctgcgcccacctcatccgggccaagctcttgcgggagggctgggtccatgccaaccggcccaagaggctgctgctggtgctggtgagcgctttctttatcttctggtccccgtttaacgtggtgctgttggtccatctgtggcgacgggtgatgctcaaggaaatctaccacccccggatgctgctcatcctccaggctagctttgccttgggctgtgtcaacagcagcctcaaccccttcctctacgtcttcgttggcagagatttccaagaaaagtttttccagtctttgacttctgccctggcgagggcgtttggagaggaggagtttctgtcatcctgtccccgtggcaacgccccccgggaagctagcaaaggagaagaactcttcactggagttgtcccaattcttgttgaattagatggtgatgttaacggccacaagttctctgtcagtggagagggtgaaggtgatgcaacatacggaaaacttaccctgaagttcatctgcactactggcaaactgcctgttccatggccaacactagtcactactctgtgctatggtgttcaatgcttttcaagatacccggatcatatgaaacggcatgactttttcaagagtgccatgcccgaaggttatgtacaggaaaggaccatcttcttcaaagatgacggcaactacaagacacgtgctgaagtcaagtttgaaggtgatacccttgttaatagaatcgagttaaaaggtattgacttcaaggaagatggcaacattctgggacacaaattggaatacaactataactcacacaatgtatacatcatggcagacaaacaaaagaatggaatcaaagtgaacttcaagacccgccacaacattgaagatggaagcgttcaactagcagaccattatcaacaaaatactccaattggcgatggccctgtccttttaccagacaaccattacctgtccacacaatctgccctttcgaaagatcccaacgaaaagagagaccacatggtccttcttgagtttgtaacagctgctgggattacacatggcatggatgaactgtacaactga

SEQ ID NO: 222 - DNA, 4380 bp, Human
atgatgtttcgctcagatcgaatgtggagctgccattggaaatggaagcccagtcctctcctgttcttatttgctttatatatcatgtgtgttcctcactcagtgtggggatgtgccaactgccgagtggttttgtccaacccttctgggacctttacttctccatgctaccctaacgactacccaaacagccaggcttgcatgtggacgctccgagcccccaccggttatatcattcagataacatttaacgactttgacattgaagaagctcccaattgcatttatgactcattatcccttgataatggagagagccagactaaattttgtggagcaactgccaaaggcctatcatttaactcaagtgcgaatgagatgcatgtgtccttttcaagtgactttagcatccagaagaaaggtttcaatgccagctacatcagagttgccgtgtccttaaggaatcaaaaggtcattttaccccagacatcagatgcttaccaggtatctgttgcaaaaagcatctctattccagagctcagtgctttcacactctgctttgaagcaaccaaagttggccatgaagacagtgattggacagctttctcctactcaaatgcatccttcacacaattgctcagttttggaaaggccaagagtggctactttctatccatttctgattcaaaatgtttgttgaataatgcattacctgtcaaagaaaaagaagacatttttgcagaaagctttgaacagctctgccttgtttggaataattctttgggctctattggtgtaaatttcaaaagaaactatgaaacagttccatgtgattctaccattagtaaagttattcctgggaatgggaaattgttgttgggctccaatcaaaatgaaattgtctctctaaaaggggacatttataactttcgactttggaattttaccatgaatgccaaaatcctctccaacctcagctgtaatgtgaaagggaatgtagtcgactggcaaaatgacttctggaatatcccaaacctagctctgaaagctgaaagcaacctaagctgtggttcctacctgatcccgctcccagcagcagaactggccagctgtgcagacctggggaccctctgtcaagctactgtaaactctcctagtactacaccacccactgtcaccactaacatgcctgttactaacagaatcgataaacaaaggaatgatggaattatctatagaatatccgtagtgattcagaacatccttcgtcaccctgaggtaaaagtacagagcaaggtggcagaatggctcaattcaaccttccaaaattggaactacacggtttatgtcgttaatatcagttttcacctgagtgctggagaggacaagattaaagtcaagagaagccttgaggatgagccaaggttggtgctttgggcccttctagtttacaatgctaccaacaatactaatttagaaggaaaaatcattcagcagaagctcctaaaaaataatgagtccttggatgaaggcttgaggctacatacagtgaatgtgagacaactgggtcattgtcttgccatggaggaacccaaaggctactactggccatctatccaaccttctgaatacgttcttccttgtccagacaagcctggcttttctgcttctcggatatgtttttacaatgctaccaacccattggtaacctactggggacctgttgatatctccaactgtttaaaagaagcaaatgaagttgctaaccagattttaaatttaactgctgatgggcagaacttaacctcagccaatattaccaacattgtggaacaggtcaaaagaattgtgaataaagaagaaaacattgatataacacttggctcaactctaatgaatatattttctaatatcttaagcagttcagacagtgacttgcttgagtcatcttctgaagctttaaaaacaattgatgaattggccttcaagatagacctaaatagcacatcacatgtgaatattacaactcggaacttggctctcagcgtatcatccctgttaccagggacaaatgcaatttcaaattttagcattggtcttccaagcaataatgaatcgtatttccagatggattttgagagtggacaagtggatccactggcatctgtaattttgcctccaaacttacttgagaatttaagtccagaagattctgtattagttagaagagcacagtttactttcttcaacaaaactggacttttccaggatgtaggaccccaaagaaaaactttagtgagttatgtgatggcgtgcagtattggaaacattactatccagaatctgaaggatcctgttcaaataaaaatcaaacatacaagaactcaggaagtgcatcatcccatctgtgccttctgggatctgaacaaaaacaaaagttttggaggatggaacacgtcaggatgtgttgcacacagagattcagatgcaagtgagacagtctgcctgtgtaaccacttcacacactttggagttctgatggaccttccaagaagtgcctcacagttagatgcaagaaacactaaagtcctcactttcatcagctatattgggtgtggaatatctgctattttttcagcagcaactctcctgacatatgttgcttttgagaaattgcgaagggattatccctccaaaatcttgatgaacctgagcacagccctgctgttcctgaatctcctcttcctcctagatggctggatcacctccttcaatgtggatggactttgcattgctgttgcagtcctgttgcatttcttccttctggcaacctttacctggatggggctagaagcaattcacatgtacattgctctagttaaagtatttaacacttacattcgccgatacattctaaaattctgcatcattggctggggtttgcctgccttagtggtgtcagttgttctagcgagcagaaacaacaatgaagtctatggaaaagaaagttatgggaaagaaaaaggtgatgaattctgttggattcaagatccagtcatattttatgtgacctgtgctgggtattttggagtcatgttttttctgaacattgccatgttcattgtggtaatggtgcagatctgtgggaggaatggcaagagaagcaaccggaccctgagagaagaagtgttaaggaacctgcgcagtgtggttagcttgacctttctgttgggcatgacatggggttttgcattctttgcctggggacccttaaatatccccttcatgtacctcttctccatcttcaattcattacaaggcttatttatattcatcttccactgtgctatgaaggagaatgttcagaaacagtggcggcggcatctctgctgtggtagatttcggttagcagataactcagattggagtaagacagctaccaatatcatcaagaaaagttctgataatctaggaaaatctttgtcttcaagctccattggttccaactcaacctatcttacatccaaatctaaatccagctctaccacctatttcaaaaggaatagccacacagataatgtctcctatgagcattccttcaacaaaagtggatcactcagacagtgcttccatggacaagtccttgtcaaaactggcccatgctctagcaaaggagaagaactcttcactggagttgtcccaattcttgttgaattagatggtgatgttaacggccacaagttctctgtcagtggagagggtgaaggtgatgcaacatacggaaaacttaccctgaagttcatctgcactactggcaaactgcctgttccatggccaacactagtcactactctgtgctatggtgttcaatgcttttcaagatacccggatcatatgaaacggcatgactttttcaagagtgccatgcccgaaggttatgtacaggaaaggaccatcttcttcaaagatgacggcaactacaagacacgtgctgaagtcaagtttgaaggtgatacccttgttaatagaatcgagttaaaaggtattgacttcaaggaagatggcaacattctgggacacaaattggaatacaactataactcacacaatgtatacatcatggcagacaaacaaaagaatggaatcaaagtgaacttcaagacccgccacaacattgaagatggaagcgttcaactagcagaccattatcaacaaaatactccaattggcgatggccctgtccttttaccagacaaccattacctgtccacacaatctgccctttcgaaagatcccaacgaaaagagagaccacatggtccttcttgagtttgtaacagctgctgggattacacatggcatggatgaactgtacaactga

SEQ ID NO: 223 - DNA, 1914 bp, Human
atggctcaaaggcagcctcactcacctaatcagactttaatttcaatcacaaatgacacagaatcatcaagctctgtggtttctaacgataacacaaataaaggatggagcggggacaactctccaggaatagaagcattgtgtgccatctatattacttatgctgtgatcatttcagtgggcatccttggaaatgctattctcatcaaagtctttttcaagaccaaatccatgcaaacagttccaaatattttcatcaccagcctggcttttggagatcttttacttctgctaacttgtgtgccagtggatgcaactcactaccttgcagaaggatggctgttcggaagaattggttgtaaggtgctctctttcatccggctcacttctgttggtgtgtcagtgttcacattaacaattctcagcgctgacagatacaaggcagttgtgaagccacttgagcgacagccctccaatgccatcctgaagacttgtgtaaaagctggctgcgtctggatcgtgtctatgatatttgctctacctgaggctatattttcaaatgtatacacttttcgagatcccaataaaaatatgacatttgaatcatgtacctcttatcctgtctctaagaagctcttgcaagaaatacattctctgctgtgcttcttagtgttctacattattccactctctattatctctgtctactattccttgattgctaggaccctttacaaaagcaccctgaacatacctactgaggaacaaagccatgcccgtaagcagattgaatcccgaaagagaattgccagaacggtattggtgttggtggctctgtttgccctctgctggttgccaaatcacctcctgtacctctaccattcattcacttctcaaacctatgtagacccctctgccatgcatttcattttcaccattttctctcgggttttggctttcagcaattcttgcgtaaacccctttgctctctactggctgagcaaaagcttccagaagcattttaaagctcagttgttctgttgcaaggcggagcggcctgagcctcctgttgctgacacctctcttaccaccctggctgtgatgggaacggtcccgggcactgggagcatacagatgtctgaaattagtgtgacctcgttcactgggtgtagtgtgaagcaggcagaggacagattcgctagcaaaggagaagaactcttcactggagttgtcccaattcttgttgaattagatggtgatgttaacggccacaagttctctgtcagtggagagggtgaaggtgatgcaacatacggaaaacttaccctgaagttcatctgcactactggcaaactgcctgttccatggccaacactagtcactactctgtgctatggtgttcaatgcttttcaagatacccggatcatatgaaacggcatgactttttcaagagtgccatgcccgaaggttatgtacaggaaaggaccatcttcttcaaagatgacggcaactacaagacacgtgctgaagtcaagtttgaaggtgatacccttgttaatagaatcgagttaaaaggtattgacttcaaggaagatggcaacattctgggacacaaattggaatacaactataactcacacaatgtatacatcatggcagacaaacaaaagaatggaatcaaagtgaacttcaagacccgccacaacattgaagatggaagcgttcaactagcagaccattatcaacaaaatactccaattggcgatggccctgtccttttaccagacaaccattacctgtccacacaatctgccctttcgaaagatcccaacgaaaagagagaccacatggtccttcttgagtttgtaacagctgctgggattacacatggcatggatgaactgtacaactga

SEQ ID NO: 224 - DNA, 2076 bp, Human
atggcttcacccagcctcccgggcagtgactgctcccaaatcattgatcacagtcatgtccccgagtttgaggtggccacctggatcaaaatcacccttattctggtgtacctgatcatcttcgtgatgggccttctggggaacagcgccaccattcgggtcacccaggtgctgcagaagaaaggatacttgcagaaggaggtgacagaccacatggtgagtttggcttgctcggacatcttggtgttcctcatcggcatgcccatggagttctacagcatcatctggaatcccctgaccacgtccagctacaccctgtcctgcaagctgcacactttcctcttcgaggcctgcagctacgctacgctgctgcacgtgctgacactcagctttgagcgctacatcgccatctgtcaccccttcaggtacaaggctgtgtcgggaccttgccaggtgaagctgctgattggcttcgtctgggtcacctccgccctggtggcactgcccttgctgtttgccatgggtactgagtaccccctggtgaacgtgcccagccaccggggtctcacttgcaaccgctccagcacccgccaccacgagcagcccgagacctccaatatgtccatctgtaccaacctctccagccgctggaccgtgttccagtccagcatcttcggcgccttcgtggtctacctcgtggtcctgctctccgtagccttcatgtgctggaacatgatgcaggtgctcatgaaaagccagaagggctcgctggccgggggcacgcggcctccgcagctgaggaagtccgagagcgaagagagcaggaccgccaggaggcagaccatcatcttcctgaggctgattgttgtgacattggccgtatgctggatgcccaaccagattcggaggatcatggctgcggccaaacccaagcacgactggacgaggtcctacttccgggcgtacatgatcctcctccccttctcggagacgtttttctacctcagctcggtcatcaacccgctcctgtacacggtgtcctcgcagcagtttcggcgggtgttcgtgcaggtgctgtgctgccgcctgtcgctgcagcacgccaaccacgagaagcgcctgcgcgtacatgcgcactccaccaccgacagcgcccgctttgtgcagcgcccgttgctcttcgcgtcccggcgccagtcctctgcaaggagaactgagaagattttcttaagcacttttcagagcgaggccgagccccagtctaagtcccagtcattgagtctcgagtcactagagcccaactcaggcgcgaaaccagccaattctgctgcagagaatggttttcaggagcatgaagttgctagcaaaggagaagaactcttcactggagttgtcccaattcttgttgaattagatggtgatgttaacggccacaagttctctgtcagtggagagggtgaaggtgatgcaacatacggaaaacttaccctgaagttcatctgcactactggcaaactgcctgttccatggccaacactagtcactactctgtgctatggtgttcaatgcttttcaagatacccggatcatatgaaacggcatgactttttcaagagtgccatgcccgaaggttatgtacaggaaaggaccatcttcttcaaagatgacggcaactacaagacacgtgctgaagtcaagtttgaaggtgatacccttgttaatagaatcgagttaaaaggtattgacttcaaggaagatggcaacattctgggacacaaattggaatacaactataactcacacaatgtatacatcatggcagacaaacaaaagaatggaatcaaagtgaacttcaagacccgccacaacattgaagatggaagcgttcaactagcagaccattatcaacaaaatactccaattggcgatggccctgtccttttaccagacaaccattacctgtccacacaatctgccctttcgaaagatcccaacgaaaagagagaccacatggtccttcttgagtttgtaacagctgctgggattacacatggcatggatgaactgtacaactga

SEQ ID NO: 225 - DNA, 1986 bp, Human
atggtccctcacctcttgctgctctgtctcctccccttggtgcgagccaccgagccccacgagggccgggccgacgagcagagcgcggaggcggccctggccgtgcccaatgcctcgcacttcttctcttggaacaactacaccttctccgactggcagaactttgtgggcaggaggcgctacggcgctgagtcccagaaccccacggtgaaagccctgctcattgtggcttactccttcatcattgtcttctcactctttggcaacgtcctggtctgtcatgtcatcttcaagaaccagcgaatgcactcggccaccagcctcttcatcgtcaacctggcagttgccgacataatgatcacgctgctcaacacccccttcactttggttcgctttgtgaacagcacatggatatttgggaagggcatgtgccatgtcagccgctttgcccagtactgctcactgcacgtctcagcactgacactgacagccattgcggtggatcgccaccaggtcatcatgcaccccttgaaaccccggatctcaatcacaaagggtgtcatctacatcgctgtcatctggaccatggctacgttcttttcactcccacatgctatctgccagaaattatttaccttcaaatacagtgaggacattgtgcgctccctctgcctgccagacttccctgagccagctgacctcttctggaagtacctggacttggccaccttcatcctgctctacatcctgcccctcctcatcatctctgtggcctacgctcgtgtggccaagaaactgtggctgtgtaatatgattggcgatgtgaccacagagcagtactttgccctgcggcgcaaaaagaagaagaccatcaagatgttgatgctggtggtagtcctctttgccctctgctggttccccctcaactgctacgtcctcctcctgtccagcaaggtcatccgcaccaacaatgccctctactttgccttccactggtttgccatgagcagcacctgctataaccccttcatatactgctggctgaacgagaacttcaggattgagctaaaggcattactgagcatgtgtcaaagacctcccaagcctcaggaggacaggccaccctccccagttccttccttcagggtggcctggacagagaagaatgatggccagagggctccccttgccaataacctcctgcccacctcccaactccagtctgggaagacagacctgtcatctgtggaacccattgtgacgatgagtgctagcaaaggagaagaactcttcactggagttgtcccaattcttgttgaattagatggtgatgttaacggccacaagttctctgtcagtggagagggtgaaggtgatgcaacatacggaaaacttaccctgaagttcatctgcactactggcaaactgcctgttccatggccaacactagtcactactctgtgctatggtgttcaatgcttttcaagatacccggatcatatgaaacggcatgactttttcaagagtgccatgcccgaaggttatgtacaggaaaggaccatcttcttcaaagatgacggcaactacaagacacgtgctgaagtcaagtttgaaggtgatacccttgttaatagaatcgagttaaaaggtattgacttcaaggaagatggcaacattctgggacacaaattggaatacaactataactcacacaatgtatacatcatggcagacaaacaaaagaatggaatcaaagtgaacttcaagacccgccacaacattgaagatggaagcgttcaactagcagaccattatcaacaaaatactccaattggcgatggccctgtccttttaccagacaaccattacctgtccacacaatctgccctttcgaaagatcccaacgaaaagagagaccacatggtccttcttgagtttgtaacagctgctgggattacacatggcatggatgaactgtacaactga

SEQ ID NO: 226 - DNA, 1905 bp, Human
atgtggaacagctctgacgccaacttctcctgctaccatgagtctgtgctgggctatcgttatgttgcagttagctggggggtggtggtggctgtgacaggcaccgtgggcaatgtgctcaccctactggccttggccatccagcccaagctccgtacccgattcaacctgctcatagccaacctcacactggctgatctcctctactgcacgctccttcagcccttctctgtggacacctacctccacctgcactggcgcaccggtgccaccttctgcagggtatttgggctcctcctttttgcctccaattctgtctccatcctgaccctctgcctcatcgcactgggacgctacctcctcattgcccaccctaagctttttccccaagttttcagtgccaaggggatagtgctggcactggtgagcacctgggttgtgggcgtggccagctttgctcccctctggcctatttatatcctggtacctgtagtctgcacctgcagctttgaccgcatccgaggccggccttacaccaccatcctcatgggcatctactttgtgcttgggctcagcagtgttggcatcttctattgcctcatccaccgccaggtcaaacgagcagcacaggcactggaccaatacaagttgcgacaggcaagcatccactccaaccatgtggccaggactgatgaggccatgcctggtcgtttccaggagctggacagcaggttagcatcaggaggacccagtgaggggatttcatctgagccagtcagtgctgccaccacccagaccctggaaggggactcatcagaagtgggagaccagatcaacagcaagagagctaagcagatggcagagaaaagccctccagaagcatctgccaaagcccagccaattaaaggagccagaagagctccggattcttcatcggaatttgggaaggtgactcgaatgtgttttgctgtgttcctctgctttgccctgagctacatccccttcttgctgctcaacattctggatgccagagtccaggctccccgggtggtccacatgcttgctgccaacctcacctggctcaatggttgcatcaaccctgtgctctatgcagccatgaaccgccaattccgccaagcatatggctccattttaaaaagagggccccggagtttccataggctccatgctagcaaaggagaagaactcttcactggagttgtcccaattcttgttgaattagatggtgatgttaacggccacaagttctctgtcagtggagagggtgaaggtgatgcaacatacggaaaacttaccctgaagttcatctgcactactggcaaactgcctgttccatggccaacactagtcactactctgtgctatggtgttcaatgcttttcaagatacccggatcatatgaaacggcatgactttttcaagagtgccatgcccgaaggttatgtacaggaaaggaccatcttcttcaaagatgacggcaactacaagacacgtgctgaagtcaagtttgaaggtgatacccttgttaatagaatcgagttaaaaggtattgacttcaaggaagatggcaacattctgggacacaaattggaatacaactataactcacacaatgtatacatcatggcagacaaacaaaagaatggaatcaaagtgaacttcaagacccgccacaacattgaagatggaagcgttcaactagcagaccattatcaacaaaatactccaattggcgatggccctgtccttttaccagacaaccattacctgtccacacaatctgccctttcgaaagatcccaacgaaaagagagaccacatggtccttcttgagtttgtaacagctgctgggattacacatggcatggatgaactgtacaactga

SEQ ID NO: 227 - DNA, 1764 bp, Human
atgaactccaccttggatggtaatcagagcagccaccctttttgcctcttggcatttggctatttggaaactgtcaatttttgccttttggaagtattgattattgtctttctaactgtattgattatttctggcaacatcattgtgatttttgtatttcactgtgcacctttgttgaaccatcacactacaagttattttatccagactatggcatatgctgacctttttgttggggtgagctgcgtggtcccttctttatcactcctccatcacccccttccagtagaggagtccttgacttgccagatatttggttttgtagtatcagttctgaagagcgtctccatggcttctctggcctgtatcagcattgatagatacattgccattactaaacctttaacctataatactctggttacaccctggagactacgcctgtgtattttcctgatttggctatactcgaccctggtcttcctgccttcctttttccactggggcaaacctggatatcatggagatgtgtttcagtggtgtgcggagtcctggcacaccgactcctacttcaccctgttcatcgtgatgatgttatatgccccagcagcccttattgtctgcttcacctatttcaacatcttccgcatctgccaacagcacacaaaggatatcagcgaaaggcaagcccgcttcagcagccagagtggggagactggggaagtgcaggcctgtcctgataagcgctatgccatggtcctgtttcgaatcactagtgtattttacatcctctggttgccatatatcatctacttcttgttggaaagctccactggccacagcaaccgcttcgcatccttcttgaccacctggcttgctattagtaacagtttctgcaactgtgtaatttatagtctctccaacagtgtattccaaagaggactaaagcgcctctcaggggctatgtgtacttcttgtgcaagtcagactacagccaacgacccttacacagttagaagcaaaggccctcttaatggatgtcatatcgctagcaaaggagaagaactcttcactggagttgtcccaattcttgttgaattagatggtgatgttaacggccacaagttctctgtcagtggagagggtgaaggtgatgcaacatacggaaaacttaccctgaagttcatctgcactactggcaaactgcctgttccatggccaacactagtcactactctgtgctatggtgttcaatgcttttcaagatacccggatcatatgaaacggcatgactttttcaagagtgccatgcccgaaggttatgtacaggaaaggaccatcttcttcaaagatgacggcaactacaagacacgtgctgaagtcaagtttgaaggtgatacccttgttaatagaatcgagttaaaaggtattgacttcaaggaagatggcaacattctgggacacaaattggaatacaactataactcacacaatgtatacatcatggcagacaaacaaaagaatggaatcaaagtgaacttcaagacccgccacaacattgaagatggaagcgttcaactagcagaccattatcaacaaaatactccaattggcgatggccctgtccttttaccagacaaccattacctgtccacacaatctgccctttcgaaagatcccaacgaaaagagagaccacatggtccttcttgagtttgtaacagctgctgggattacacatggcatggatgaactgtacaactga

SEQ ID NO: 228 - DNA, 3570 bp, Human
atgccgggcccgctagggctgctctgcttcctcgccctggggctgctcggctcggccgggcccagcggcgcggcgccgcctctctgcgcggcgccctgcagctgcgacggcgaccgtcgggtggactgctccgggaaggggctgacggccgtgcccgaggggctcagcgccttcacccaagcgctggatatcagtatgaacaacattactcagttgccagaagatgcatttaagaactttccttttctagaagagctacaattggcgggcaacgacctttcttttatccacccaaaggccttgtctgggttgaaagaactcaaagttctaacgctccagaataatcagttgaaaacagtacccagtgaagccattcgagggctgagtgctttgcagtctttgcgtttagatgccaaccatattacctcagtccccgaggacagttttgaaggacttgttcagttacggcatctgtggctggatgacaacagcttgacggaggtgcctgtgcaccccctcagcaatctgcccaccctacaggcgctgaccctggctctcaacaagatctcaagcatccctgactttgcatttaccaacctttcaagcctggtagttctgcatcttcataacaataaaattagaagcctgagtcaacactgttttgatggactagataacctggagaccttagacttgaattataataacttgggggaatttcctcaggctattaaagcccttcctagccttaaagagctaggatttcatagtaattctatttctgttatccctgatggagcatttgatggtaatccactcttaagaactatacatttgtatgataatcctctgtcttttgtggggaactcagcatttcacaatttatctgatcttcattccctagtcattcgtggtgcaagcatggtgcagcagttccccaatcttacaggaactgtccacctggaaagtctgactttgacaggtacaaagataagcagcatacctaataatttgtgtcaagaacaaaagatgcttaggactttggacttgtcttacaataatataagagaccttccaagttttaatggttgccatgctctggaagaaatttctttacagcgtaatcaaatctaccaaataaaggaaggcacctttcaaggcctgatatctctaaggattctagatctgagtagaaacctgatacatgaaattcacagtagagcttttgccacacttgggccaataactaacctagatgtaagtttcaatgaattaacttcctttcctacggaaggcctgaatgggctaaatcaactgaaacttgtgggcaacttcaagctgaaagaagccttagcagcaaaagactttgttaacctcaggtctttatcagtaccatatgcttatcagtgctgtgcattttggggttgtgactcttatgcaaatttaaacacagaagataacagcctccaggaccacagtgtggcacaggagaaaggtactgctgatgcagcaaatgtcacaagcactcttgaaaatgaagaacatagtcaaataattatccattgtacaccttcaacaggtgcttttaagccctgtgaatatttactgggaagctggatgattcgtcttactgtgtggttcattttcttggttgcattatttttcaacctgcttgttattttaacaacatttgcatcttgtacatcactgccttcgtccaaattgtttataggcttgatttctgtgtctaacttattcatgggaatctatactggcatcctaacttttcttgatgctgtgtcctggggcagattcgctgaatttggcatttggtggcaaactggcagtggctgcaaagtagctgggtttcttgcagttttctcctcagaaagtgccatatttttattaatgctagcaactgtcgaaagaagcttatctgcaaaagatataatgaaaaatgggaagagcaatcatctcaaacagttccgggttgctgcccttttggctttcctaggtgctacagtagcaggctgttttccccttttccatagaggggaatattctgcatcacccctttgtttgccatttcctacaggtgaaacgccatcattaggattcactgtaacgttagtgctattaaactcactagcatttttattaatggccgttatctacactaagctatactgcaacttggaaaaagaggacctctcagaaaactcacaatctagcatgattaagcatgtcgcttggctaatcttcaccaattgcatctttttctgccctgtggcgtttttttcatttgcaccattgatcactgcaatctctatcagccccgaaataatgaagtctgttactctgatattttttccattgcctgcttgcctgaatccagtcctgtatgttttcttcaacccaaagtttaaagaagactggaagttactgaagcgacgtgttaccaagaaaagtggatcagtttcagtttccatcagtagccaaggtggttgtctggaacaggatttctactacgactgtggcatgtactcacatttgcagggcaacctgactgtttgcgactgctgcgaatcgtttcttttaacaaagccagtatcatgcaaacacttgataaaatcacacagctgtcctgcattggcagtggcctcttgccaaagacctgagggctactggtccgactgtggcacacagtcggcccactctgattatgcagatgaagaagattcctttgtctcagacagttctgaccaggtgcaggcctgtggacgagcctgcttctaccagagtagaggattccctttggtgcgctatgcttacaatctaccaagagttaaagacactagcaaaggagaagaactcttcactggagttgtcccaattcttgttgaattagatggtgatgttaacggccacaagttctctgtcagtggagagggtgaaggtgatgcaacatacggaaaacttaccctgaagttcatctgcactactggcaaactgcctgttccatggccaacactagtcactactctgtgctatggtgttcaatgcttttcaagatacccggatcatatgaaacggcatgactttttcaagagtgccatgcccgaaggttatgtacaggaaaggaccatcttcttcaaagatgacggcaactacaagacacgtgctgaagtcaagtttgaaggtgatacccttgttaatagaatcgagttaaaaggtattgacttcaaggaagatggcaacattctgggacacaaattggaatacaactataactcacacaatgtatacatcatggcagacaaacaaaagaatggaatcaaagtgaacttcaagacccgccacaacattgaagatggaagcgttcaactagcagaccattatcaacaaaatactccaattggcgatggccctgtccttttaccagacaaccattacctgtccacacaatctgccctttcgaaagatcccaacgaaaagagagaccacatggtccttcttgagtttgtaacagctgctgggattacacatggcatggatgaactgtacaactga

SEQ ID NO: 229 - DNA, 1761 bp, Human
atggtgaataatttctcccaagctgaggctgtggagctgtgttacaagaacgtgaacgaatcctgcattaaaactccttactcgccaggtcctcgatctatcctctacgccgtccttggttttggggctgtgctggcagcgtttggaaacttactggtcatgattgctatccttcacttcaaacaactgcacacacctacaaactttctgattgcgtcgctggcctgtgctgacttcttggtgggagtcactgtgatgcccttcagcacagtgaggtctgtggagagctgttggtactttggggacagttactgtaaattccatacatgttttgacacatccttctgttttgcttctttatttcatttatgctgtatctctgttgatagatacattgctgttactgatcctctgacctatccaaccaagtttactgtgtcagtttcagggatatgcattgttctttcctggttcttttctgtcacatacagcttttcgatcttttacacgggagccaacgaagaaggaattgaggaattagtagttgctctaacctgtgtaggaggctgccaggctccactgaatcaaaactgggtcctactttgttttcttctattctttatacccaatgtcgccatggtgtttatatacagtaagatatttttggtggccaagcatcaggctaggaagatagaaagtacagccagccaagctcagtcctcctcagagagttacaaggaaagagtagcaaaaagagagagaaaggctgccaaaaccttgggaattgctatggcagcatttcttgtctcttggctaccatacctcgttgatgcagtgattgatgcttatatgaattttataactcctccttatgtttatgagattttagtttggtgtgtttattataattcagctatgaaccccttgatttatgctttcttttaccaatggtttgggaaggcaataaaacttattgtaagcggcaaggtcttaaggactgattcgtcaacaactaatttattttctgaagaagtagagacagatgctagcaaaggagaagaactcttcactggagttgtcccaattcttgttgaattagatggtgatgttaacggccacaagttctctgtcagtggagagggtgaaggtgatgcaacatacggaaaacttaccctgaagttcatctgcactactggcaaactgcctgttccatggccaacactagtcactactctgtgctatggtgttcaatgcttttcaagatacccggatcatatgaaacggcatgactttttcaagagtgccatgcccgaaggttatgtacaggaaaggaccatcttcttcaaagatgacggcaactacaagacacgtgctgaagtcaagtttgaaggtgatacccttgttaatagaatcgagttaaaaggtattgacttcaaggaagatggcaacattctgggacacaaattggaatacaactataactcacacaatgtatacatcatggcagacaaacaaaagaatggaatcaaagtgaacttcaagacccgccacaacattgaagatggaagcgttcaactagcagaccattatcaacaaaatactccaattggcgatggccctgtccttttaccagacaaccattacctgtccacacaatctgccctttcgaaagatcccaacgaaaagagagaccacatggtccttcttgagtttgtaacagctgctgggattacacatggcatggatgaactgtacaactga

SEQ ID NO: 230 - DNA, 5433 bp, Human
atgaccccagcctgtcccctcttactgtctgtgattctgtccctgcgcctggccaccgccttcgaccccgcccccagtgcctgctctgccctggcctcgggtgtgctctacggggccttctcgctgcaggacctctttcctaccatcgcctcgggctgctcctggaccctggagaaccctgaccccaccaagtactccctctacctgcgcttcaaccgccaggagcaggtgtgcgcacactttgccccccgcctgctgcccctggaccactacctggtcaactttacctgcctgcggcctagccccgaggaggcggtggcccaggcggagtcagaggtggggcggccagaagaggaggaggcagaggcggcagcggggttggagctgtgcagcggctcaggcccctttaccttcctgcacttcgacaagaacttcgtgcagctgtgcctgtcggctgagccctccgaggccccgcgcctgctggcgcccgctgccctagccttccgctttgtcgaggtcttgctcatcaacaacaacaactctagccaattcacctgtggtgtgctctgccgctggagtgaggagtgtggccgcgctgccggcagggcctgcggctttgctcagccaggctgcagctgccctggagaggcgggggccggctccaccaccaccacatctccaggccctcctgctgcccacaccctgtccaatgccctggtgcccgggggcccagccccacctgctgaggccgatttgcactcggggagcagcaatgatctgttcacaaccgagatgagatatggtgaggagccggaagaggaaccgaaagtgaaaacccagtggccgaggtctgcagatgagcctgggctatacatggcgcagacaggcgacccggcggctgaggagtggtccccgtggagcgtgtgttccctgacgtgtgggcagggtctgcaggtgcggacccgctcctgtgtgtcctccccctatgggaccctgtgcagcgggcccctgcgggagaccaggccctgcaacaattcagccacctgcccagtgcacggcgtgtgggaggagtgggggtcctggagcctgtgctcccgcagctgcgggcgggggtcccggagccggatgcggacctgcgtgcccccccagcacggcggcaaggcctgcgagggtcctgagctgcagactaagctctgcagtatggctgcctgcccggtggaaggccagtggttagaatggggtccctggggcccatgctccacgtcctgtgccaatgggacccaacagcgcagccggaagtgcagcgtggcgggcccagcctgggccacatgcacgggtgccctcactgacacccgggagtgcagcaacctcgagtgcccggccactgatagcaagtgggggccatggaatgcgtggagcctgtgctctaagacgtgtgacacaggctggcagcgccgcttccgcatgtgccaggccacgggcacgcagggctacccctgcgagggcaccggagaggaggtgaagccttgtagtgagaagaggtgtccagccttccatgagatgtgcagggatgagtacgtgatgctgatgacgtggaagaaggcagctgctggcgagatcatctacaacaagtgccccccgaatgcctcagggtctgccagccgccgctgcctcctcagtgcccaaggcgtggcgtactgggggctgcccagctttgctcgctgcatctcccatgagtaccgctacctgtatctgtcacttagggagcacctggccaaggggcagcgcatgctggcaggcgagggcatgtcgcaggtggtgcgcagcctgcaggagctactggcccggcgcacctactatagtggggacctgctcttctctgtggacattctgaggaatgtcactgacacctttaagagggccacctacgtgccctcggctgatgatgtgcagcgcttcttccaggtggtgagcttcatggtggatgcggaaaacaaggagaagtgggacgatgctcagcaggtgtcccctggctctgtgcacctgctccgtgtcgtggaggacttcattcacctggtgggcgatgctctcaaggccttccagagctctctgattgtcacagataatctagtgatcagcattcagcgagagcccgtctcagctgtgtccagtgacatcacgttccccatgcggggccgccggggcatgaaggactgggtgcggcactcagaggaccgcctcttcctgcccaaggaggtgctcagcctctcctccccagggaagccagccacatctggggcagcaggcagccctggcagggggaggggcccaggaacggtgcctcctggcccaggccactcccaccagcgcctcctcccagcagaccctgatgagtcctcctactttgtgatcggtgctgtactctaccgcacccttggcctcatcctgccgcctcccaggcccccgctggccgtcacatcccgggtgatgacagtgactgtgcgcccccctacccagcctccagctgagcccctcatcactgtggagctctcctacatcatcaatgggaccacggatccccattgcgccagctgggactactccagagcagatgccagctcaggagactgggacactgaaaattgccagaccctggagacccaggcagctcacacccgctgccagtgccagcacctgtccacctttgctgtactagcccagccgcccaaggacctgaccctggagctggcaggctccccctcggtccccctggtgatcggctgtgcagtgtcgtgcatggcgctgcttaccctgctcgccatctatgccgccttttggaggttcataaaatctgaacgctccatcatcttgctgaacttctgcctgtccatcttggcatccaacatcctgatcctcgtgggccagtcccgggtgctgagcaagggcgtgtgcaccatgacggctgccttcctgcacttcttctttctctcctccttttgctgggtgcttaccgaggcctggcagtcctacctggctgtcattgggcggatgcgcacccgcctcgttcgcaagcgcttcctctgcctgggctggggtctgcctgccctggtggtggccgtgtctgttggctttacccgaacgaaaggatacggtacatccagctactgctggctctccctggagggcggcctgctctacgcctttgtgggccctgcagccgtcattgtcctggtgaacatgctcatcggaatcatcgtcttcaacaagctcatggcacgtgatggcatctccgacaaatccaagaagcagagggccgggtcggagcggtgcccctgggccagcctgctcctcccctgctcagcgtgtggagcggtccccagccccctgctcagctcagcctcggccaggaacgccatggcctcactctggagctcctgcgtggtgctgcccctgctggcgctcacctggatgtctgccgtcctggctatgacagaccgccgttccgtcctcttccaggccctctttgctgtcttcaactccgcgcagggctttgtcatcactgctgtgcactgcttcctgcgccgagaggtccaggatgtggtgaagtgccagatgggggtgtgccgggctgatgagagcgaagactcccctgactcgtgtaagaacgggcagctgcagatcctgtcagactttgaaaaggatgtggatctggcttgtcaaacagtgctgttcaaggaggtcaacacttgcaacccgtccaccatcacgggcacactatcccgcctgtccctggatgaggatgaggagcccaagtcctgcctcgtgggccctgagggcagcctcagcttctcaccactgcctgggaatatcctggtgcccatggcagcctcaccagggctgggggagcctccgcccccacaggaggccaaccctgtttacatgtgtggggagggtggcctgcggcagctggacctcacatggctgcggcccactgagccaggctctgagggagactacatggtgctgccccggcggactttgagcctgcagcctggcggtgggggtggaggtggtgaggatgcccccagggcccggccggaggggaccccccggcgagctgccaagacagtggcccacactgaaggctaccccagcttcctgtccgtggaccactcgggcctggggctgggccctgcctatggatctctccagaatccctatggaatgaccttccaaccgccaccgccgacacccagcgcccgccaagtgcccgagccaggggagcgcagccggaccatgcctcgcaccgtgcccggctctaccatgaagatgggctccctggagcgaaagaaattacggtattcagacctggactttgaggtgatgcacacccggaaacggcattcagaactctaccacgagctcaaccagaagttccacactttcgaccgctaccgcagccagtccacggccaagagggagaagcggtggagtgtgtcctcgggtggggcggccgagcggagcgtgtgcaccgataagcccagccctggggagcgccccagcttgtcccaacatcggcgccatcagagctggagcaccttcaaatctatgacactgggctcgctgccccccaagccccgagaacggctgactctgcaccgggcagcagcctgggagcccacagaaccaccggatggtgacttccagacagaggtggctagcaaaggagaagaactcttcactggagttgtcccaattcttgttgaattagatggtgatgttaacggccacaagttctctgtcagtggagagggtgaaggtgatgcaacatacggaaaacttaccctgaagttcatctgcactactggcaaactgcctgttccatggccaacactagtcactactctgtgctatggtgttcaatgcttttcaagatacccggatcatatgaaacggcatgactttttcaagagtgccatgcccgaaggttatgtacaggaaaggaccatcttcttcaaagatgacggcaactacaagacacgtgctgaagtcaagtttgaaggtgatacccttgttaatagaatcgagttaaaaggtattgacttcaaggaagatggcaacattctgggacacaaattggaatacaactataactcacacaatgtatacatcatggcagacaaacaaaagaatggaatcaaagtgaacttcaagacccgccacaacattgaagatggaagcgttcaactagcagaccattatcaacaaaatactccaattggcgatggccctgtccttttaccagacaaccattacctgtccacacaatctgccctttcgaaagatcccaacgaaaagagagaccacatggtccttcttgagtttgtaacagctgctgggattacacatggcatggatgaactgtacaactga

SEQ ID NO: 231 - DNA, 1692 bp, Human
atggatgggtcaaacgtgacatcatttgttgttgaggaacccacgaacatctcaactggcaggaacgcctcagtcgggaatgcacatcggcaaatccccatcgtgcactgggtcattatgagcatctccccagtggggtttgttgagaatgggattctcctctggttcctgtgcttccggatgagaagaaatcccttcactgtctacatcacccacctgtctatcgcagacatctcactgctcttctgtattttcatcttgtctatcgactatgctttagattatgagctttcttctggccattactacacaattgtcacattatcagtgacttttctgtttggctacaacacgggcctctatctgctgacggccattagtgtggagaggtgcctgtcagtcctttaccccatctggtaccgatgccatcgccccaagtaccagtcggcattggtctgtgcccttctgtgggctctttcttgcttggtgaccaccatggagtatgtcatgtgcatcgacagagaagaagagagtcactctcggaatgactgccgagcagtcatcatctttatagccatcctgagcttcctggtcttcacgcccctcatgctggtgtccagcaccatcttggtcgtgaagatccggaagaacacgtgggcttcccattcctccaagctttacatagtcatcatggtcaccatcattatattcctcatcttcgctatgcccatgagactcctttacctgctgtactatgagtattggtcgacctttgggaacctacaccacatttccctgctcttctccacaatcaacagtagcgccaaccctttcatttacttctttgtgggaagcagtaagaagaagagattcaaggagtccttaaaagttgttctgaccagggctttcaaagatgaaatgcaacctcggcgccagaaagacaattgtaatacggtcacagttgagactgtcgtcgctagcaaaggagaagaactcttcactggagttgtcccaattcttgttgaattagatggtgatgttaacggccacaagttctctgtcagtggagagggtgaaggtgatgcaacatacggaaaacttaccctgaagttcatctgcactactggcaaactgcctgttccatggccaacactagtcactactctgtgctatggtgttcaatgcttttcaagatacccggatcatatgaaacggcatgactttttcaagagtgccatgcccgaaggttatgtacaggaaaggaccatcttcttcaaagatgacggcaactacaagacacgtgctgaagtcaagtttgaaggtgatacccttgttaatagaatcgagttaaaaggtattgacttcaaggaagatggcaacattctgggacacaaattggaatacaactataactcacacaatgtatacatcatggcagacaaacaaaagaatggaatcaaagtgaacttcaagacccgccacaacattgaagatggaagcgttcaactagcagaccattatcaacaaaatactccaattggcgatggccctgtccttttaccagacaaccattacctgtccacacaatctgccctttcgaaagatcccaacgaaaagagagaccacatggtccttcttgagtttgtaacagctgctgggattacacatggcatggatgaactgtacaactga

SEQ ID NO: 232 - DNA, 2124 bp, Human
atgcagatggccgatgcagccacgatagccaccatgaataaggcagcaggcggggacaagctagcagaactcttcagtctggtcccggaccttctggaggcggccaacacgagtggtaacgcgtcgctgcagcttccggacttgtggtgggagctggggctggagttgccggacggcgcgccgccaggacatcccccgggcagcggcggggcagagagcgcggacacagaggcccgggtgcggattctcatcagcgtggtgtactgggtggtgtgcgccctggggttggcgggcaacctgctggttctctacctgatgaagagcatgcagggctggcgcaagtcctctatcaacctcttcgtcaccaacctggcgctgacggactttcagtttgtgctcaccctgcccttctgggcggtggagaacgctcttgacttcaaatggcccttcggcaaggccatgtgtaagatcgtgtccatggtgacgtccatgaacatgtacgccagcgtgttcttcctcactgccatgagtgtgacgcgctaccattcggtggcctcggctctgaagagccaccggacccgaggacacggccggggcgactgctgcggccggagcctgggggacagctgctgcttctcggccaaggcgctgtgtgtgtggatctgggctttggccgcgctggcctcgctgcccagtgccattttctccaccacggtcaaggtgatgggcgaggagctgtgcctggtgcgtttcccggacaagttgctgggccgcgacaggcagttctggctgggcctctaccactcgcagaaggtgctgctgggcttcgtgctgccgctgggcatcattatcttgtgctacctgctgctggtgcgcttcatcgccgaccgccgcgcggcggggaccaaaggaggggccgcggtagccggaggacgcccgaccggagccagcgcccggagactgtcgaaggtcaccaaatcagtgaccatcgttgtcctgtccttcttcctgtgttggctgcccaaccaggcgctcaccacctggagcatcctcatcaagttcaacgcggtgcccttcagccaggagtatttcctgtgccaggtatacgcgttccctgtgagcgtgtgcctagcgcactccaacagctgcctcaaccccgtcctctactgcctcgtgcgccgcgagttccgcaaggcgctcaagagcctgctgtggcgcatcgcgtctccttcgatcaccagcatgcgccccttcaccgccactaccaagccggagcacgaggatcaggggctgcaggccccggcgccgccccacgcggccgcggagccggacctgctctactacccacctggcgtcgtggtctacagcggggggcgctacgacctgctgcccagcagctctgcctacactagcaaaggagaagaactcttcactggagttgtcccaattcttgttgaattagatggtgatgttaacggccacaagttctctgtcagtggagagggtgaaggtgatgcaacatacggaaaacttaccctgaagttcatctgcactactggcaaactgcctgttccatggccaacactagtcactactctgtgctatggtgttcaatgcttttcaagatacccggatcatatgaaacggcatgactttttcaagagtgccatgcccgaaggttatgtacaggaaaggaccatcttcttcaaagatgacggcaactacaagacacgtgctgaagtcaagtttgaaggtgatacccttgttaatagaatcgagttaaaaggtattgacttcaaggaagatggcaacattctgggacacaaattggaatacaactataactcacacaatgtatacatcatggcagacaaacaaaagaatggaatcaaagtgaacttcaagacccgccacaacattgaagatggaagcgttcaactagcagaccattatcaacaaaatactccaattggcgatggccctgtccttttaccagacaaccattacctgtccacacaatctgccctttcgaaagatcccaacgaaaagagagaccacatggtccttcttgagtttgtaacagctgctgggattacacatggcatggatgaactgtacaactga

SEQ ID NO: 233 - DNA, 2241 bp, Human
atgacgtccacctgcaccaacagcacgcgcgagagtaacagcagccacacgtgcatgcccctctccaaaatgcccatcagcctggcccacggcatcatccgctcaaccgtgctggttatcttcctcgccgcctctttcgtcggcaacatagtgctggcgctagtgttgcagcgcaagccgcagctgctgcaggtgaccaaccgttttatctttaacctcctcgtcaccgacctgctgcagatttcgctcgtggccccctgggtggtggccacctctgtgcctctcttctggcccctcaacagccacttctgcacggccctggttagcctcacccacctgttcgccttcgccagcgtcaacaccattgtcttggtgtcagtggatcgctacttgtccatcatccaccctctctcctacccgtccaagatgacccagcgccgcggttacctgctcctctatggcacctggattgtggccatcctgcagagcactcctccactctacggctggggccaggctgcctttgatgagcgcaatgctctctgctccatgatctggggggccagccccagctacactattctcagcgtggtgtccttcatcgtcattccactgattgtcatgattgcctgctactccgtggtgttctgtgcagcccggaggcagcatgctctgctgtacaatgtcaagagacacagcttggaagtgcgagtcaaggactgtgtggagaatgaggatgaagagggagcagagaagaaggaggagttccaggatgagagtgagtttcgccgccagcatgaaggtgaggtcaaggccaaggagggcagaatggaagccaaggacggcagcctgaaggccaaggaaggaagcacggggaccagtgagagtagtgtagaggccaggggcagcgaggaggtcagagagagcagcacggtggccagcgacggcagcatggagggtaaggaaggcagcaccaaagttgaggagaacagcatgaaggcagacaagggtcgcacagaggtcaaccagtgcagcattgacttgggtgaagatgacatggagtttggtgaagacgacatcaatttcagtgaggatgacgtcgaggcagtgaacatcccggagagcctcccacccagtcgtcgtaacagcaacagcaaccctcctctgcccaggtgctaccagtgcaaagctgctaaagtgatcttcatcatcattttctcctatgtgctatccctggggccctactgctttttagcagtcctggccgtgtgggtggatgtcgaaacccaggtaccccagtgggtgatcaccataatcatctggcttttcttcctgcagtgctgcatccacccctatgtctatggctacatgcacaagaccattaagaaggaaatccaggacatgctgaagaagttcttctgcaaggaaaagcccccgaaagaagatagccacccagacctgcccggaacagagggtgggactgaaggcaagattgtcccttcctacgattctgctacttttcctgctagcaaaggagaagaactcttcactggagttgtcccaattcttgttgaattagatggtgatgttaacggccacaagttctctgtcagtggagagggtgaaggtgatgcaacatacggaaaacttaccctgaagttcatctgcactactggcaaactgcctgttccatggccaacactagtcactactctgtgctatggtgttcaatgcttttcaagatacccggatcatatgaaacggcatgactttttcaagagtgccatgcccgaaggttatgtacaggaaaggaccatcttcttcaaagatgacggcaactacaagacacgtgctgaagtcaagtttgaaggtgatacccttgttaatagaatcgagttaaaaggtattgacttcaaggaagatggcaacattctgggacacaaattggaatacaactataactcacacaatgtatacatcatggcagacaaacaaaagaatggaatcaaagtgaacttcaagacccgccacaacattgaagatggaagcgttcaactagcagaccattatcaacaaaatactccaattggcgatggccctgtccttttaccagacaaccattacctgtccacacaatctgccctttcgaaagatcccaacgaaaagagagaccacatggtccttcttgagtttgtaacagctgctgggattacacatggcatggatgaactgtacaactga

1. A method of determining a ligand to a receptor protein for which a ligand has not been identified, which comprises using a fusion protein of the receptor protein and a fluorescent protein.

2. The ligand determination method according to claim 1, wherein the fusion protein of a receptor protein for which a ligand has not been identifyd and GFP is used.

3. The ligand determination method according to claim 1, wherein a cell expressed with the fusion protein of a receptor protein for which a ligand has not been identified and GFP or a membrane fraction of the cell is brought in contact with a test compound.

4. The ligand determination method according to claim 1, which comprises assaying (1) an activity that accelerates or suppresses arachidonic acid release, acetylcholine release, intracellular Ca²⁺ release, intracellular cAMP production, intracellular cGMP production, inositol phosphate production, changes in cell membrane potential, phosphorylation of intracellular proteins, activation of c-fos or pH reduction, (2) MAP kinase activation, (3) transcription factor activation, (4) diacylglycerol production, (5) opening or closing of ion channels on a cell membrane, (6) apoptosis induction, (7) morphological changes in cells, (8) transport of the fusion protein from cell membrane to cytoplasm, (9) low molecular weight G protein activation, (10) cell division-promoting activity or (11) DNA synthesis-promoting activity.

5. The ligand determination method according to claim 1, wherein transport of the fusion protein from cell membrane to cytoplasm is assayed.

6. The ligand determination method according to claim 5, wherein transport of the fusion protein from cell membrane to cytoplasm is assayed by observing the fluorescence of GFP.

7. The ligand determination method according to claim 1, which comprises bringing a cell capable of expressing the fusion protein of a receptor protein for which a ligand has not been identified the receptor protein and a fluorescent protein and containing a plasmid ligated with a DNA encoding a reporter protein at the downstream of cAMP response element/promoter in contact with a test compound and assaying the activity of the reporter protein.

8. The method according to claim 7, which comprises culturing a cell containing (1) a plasmid containing a DNA encoding the fusion protein of a receptor protein for which a ligand has not been identified and a fluorescent protein and (2) a plasmid ligated with a DNA encoding a reporter protein at the downstream of cAMP response element/promoter, and bringing the cell in contact with a test compound and assaying the activity of the reporter protein.

9. The ligand determination method according to claim 2, wherein a cell capable of expressing the fusion protein of a receptor protein for which a ligand has not been identified and GFP and containing a plasmid ligated with a DNA encoding a reporter protein at the downstream of cAMP response element/promoter is brought in contact with a test compound and assaying the activity of the reporter protein.

10. The ligand determination method according to claim 9, which comprises culturing a cell containing (1) a plasmid containing a DNA encoding the fusion protein of a receptor protein for which a ligand has not been identified and GFP and (2) a plasmid ligated with a DNA encoding a reporter protein at the downstream of cAMP response element/promoter, bringing the cell in contact with a test compound and assaying the activity of the reporter protein.

11. The method according to claim 1, wherein the receptor protein is a G protein-coupled receptor protein.

12. The method according to claim 1, wherein GFP is a protein containing the same or substantially the same amino acid sequence as the amino acid sequence represented by SEQ ID NO: 1, SEQ ID NO: 3, SEQ ID NO: 5 or SEQ ID NO: 7.

13. The method according to claim 7, wherein the promoter is a TATA-like sequence.

14. The method according to claim 7, wherein the reporter protein is luciferase.

15. The method according to claim 7, wherein the plasmid is a plasmid ligated with a TATA-like promoter and a gene encoding the reporter protein at the downstream of cAMP response element.

16. The method according to claim 7, wherein the cell has expressed at least two receptor proteins for which ligands have not been identified.

17. The method according to claim 7, wherein the cell further contains a plasmid containing a gene encoding an inhibitory G protein a subunit Gi.

18. The method according to claim 7, wherein forskolin is further added.

19. The method according to claim 16, wherein the at least two receptor proteins have similar characteristics.

20. The method according to claim 19, wherein the similar characteristics are the basic expression level of the reporter protein and/or the expression level of the reporter protein when fdrskolin is added.

21. The method according to claim 16, which comprises measuring the basic expression level of the reporter protein when the at least two receptor proteins are expressed individually and/or the expression level of the reporter protein by the addition of forskolin, and being expressed in combination the at leas two receptor proteins having an equivalent expression level of the reporter protein.

22. A fusion protein of a receptor protein for which a ligand has not been identified and a fluorescent protein, or a salt thereof.

23. The fluorescent protein or a salt thereof according to claim 22, wherein the fluorescent protein is GFP.

24. A DNA containing a DNA encoding the fusion protein according to claim 22.

25. A recombinant vector containing the DNA according to claim 22.

26. A transfornant transformed with the recombinant vector according to claim 25.

27. Use of a fluorescent protein to determine a ligand to a receptor protein for which a ligand has not been identified.

28. Use of GFP to determine a ligand to a receptor protein for which a ligand has not been identified.
